United States Patent Application Publication US 2011/0189663 A1 - sequence listing, part 7

SEQ ID NO: 5669 - DNA, 88483 bp, Homo sapiens
  ATP6V1C1 gene - 104102487 - 104150969 of chr8; NCBI Entrez Gene ID: 528; Build 35; sequence includes 20,000 bases upstream of initiation codon and 20,000 bases downstream of termination codon of the gene
gcttggacatgaatttaaagacaatgggaactcacatttaagtttctgaaacagccaggcgtggtggctcatgcctgtaatcccagcacttcgggaggctgaggcaggtggatcacctgagatcaggagtttgagaccagtctaaccaacatggagaaaccccatctctacttaaaagaaaaaaaaaatacaaaattagccgggtatggtggtgcatgcctgcaagggaggagaccaccccttatattgtcttatgcccaatttctgcctccaaagaaagaagaagtaaaaactaaaagtcagaaatggaattcacaagcagacagcctggcgccacactctgggtctggtagttaaagatcaacccctgacctaattggttatttgcataagaaaaagcactgtgaagatccctgtcctgttctgttccattctaattaccggtacatgcagcccccagtcatgtaccccctgcttgctcaatcgatcacgaccctctcacgtggaccccgttagagttgtgagcccttaaaagggacaggaattgcttattcagggagctcggttgttggagacatgagtcttgccgaagctcctggccaaataaagcccttccttctttaactcggtgtctgaggggttttgtcagtagcttgtcctgctacacctgtaatcccagctactcgggaggctgaggtgggagaattgcttgaacccaggaggcagaggttacagtgagccgagattatgccattgcactccagtctgggtaacaagagcaaaactccatctcgaagaaaaaaaagtttctgaatggggagctgttctggagtatgcaggaaggattggggtgggaggagaacaagaagaggaatacgttttagcgatattgcagttatttcaggttaaaagtgatagagtcaggggctgaaccaggatatcggccatagaagcagaaaggaaggggtatgtgtgaaagaaattaagaaagaagatgtcaggcctctgagcccaagctaagccatcatatcccctgtgacctgcacgtatacatccagatggcctgaagcaactgaagaatcacaaaagaagtgaaaatggctgattcctgccttaactgatgacattaccttgtgaaattccttctcctggctcagaagctcccctactgagcaccttgtgacaccccacccctgcctgccagagaacaaccccctttgactgtaattttccactacctacccaaatcctataaaatggccttatccctatttccctttgctgactctcttttcagactcagcccacctgcacccagatgattaaaaatttttattgctcacataaagcctgtttggtggtctcttcacatggacacgcgtgacatttggtgccaaaacccaggattatccctgataccacacctgacccctatgactgtatatctctaatccacctggcattcactcgatttccccatatttccttctttcctgttcctcaccctgatcatacttggtttattgatggcagttccaccatgcctaatcaccattcaccagcaaaggcaggctatgctatagtatcttcgacacctatcattgaggttactgctctgccccccttcactactgctcaacaagccaaactcatttccttaacttgagccctcactcttgtaaaaggactacgcgtcaatatttatactgactttaaatatgccttccatatcctgcaccaccatgctgttatatgggcgaaaagaagtttcctcactacacaagggtcctccatcgttaatgcctcttcaataaaaactcttctcaaggtcgctttacttccaaaaaaaactagagtcattcactgcaagggccatcaaaaggcatcagatcccattgctcagggcagcacttatgctgataaggtagctaaaaaagcagctagtgttccaacttctatccctcatggcagtttttctccttctcatcagtcactcccacttacttccccactgaaacttccacctatcaatctcttcccacacaaggcaaatggttcttggaccaaggaaaatatcttcttccagcctcacaggcccattctattccatcgtcatttcataacctcttccatgtaggttacaagccgctagcctgcctcttagaacctctcaattcctttccattgtggaaatctatcctcaagaaaatcacttctcagtgttccatctgctattctactactcctcagggattgttcaggccccctcccttccctacacatcaagctcggggatttgcccccacccaggactggcaaattggcttactcacatgccccaagtcaggaaactaaaatacctcatggtctaggtagacattttcactggctgggtagaggcctttcccacagggtctgaaaatgccaccgtggtcatttcttcccttctgtaagacataatccctcggtttggccttcccacctctatacagtcccagctgtatacaataacggaccagcctttattagtcaaatcacccaagcagtttctcaggctcttggtattcagtggaaccttcataccccttactgtcctcaatcttcaggaaaggtagaatggaccaatggtcttttaaaaacacacctcaccaagctcagcctccaacttaaaaacgaggactctgtcaaggatagagaccaaaaactcaccaatcaaggaagtaattatgctgaacccccttgggcactctctaattggatgttctgggttctcccaattcttagtcctttaatacctgtttttctccttctcttattcagaccttgtgtcttctgtttagtttcttaattcatacaaaacggcatccaggccatcaccaatcattctatatgacaaatgctccttttaacaaccccacaatattgccccttaccacaaaatcttccttcagctaaatctctcccactctaggttcccacactgcccctaatcccgctcgaagcagccctgagaaacatcgcccattatctctccataccaccccccaaaattttcaccaccccaacacttcaacactattttgttttatttttcttattaatataagaagacaggaatgtcaggcctctgagcccaagccaagccatcatatcccctgtgacctgcatgtatacatccagatggcctgaagcaactgaagaatcacgaaagaagtgaaaatggctggtttctgccttaactgataacattaccttgtgaaattccttctcctggctcagaagttcccccactgagcaccttgtgagccccaccactgcccgccagagaacgaccccctttgactgtaatttttctttacttacccaaatcctataaaatagccccatccctatctcccttcactgactctcttttcggattcagcccacctgcacccaggtgattcaaaagctttattgctcacataaagcctgtctggtggtctcttcacatggacacgcatgacagagaacttgttaggacttaacatcaggtgaaaattatgaggaagatggaaaaattaaagagggtataaaggtcttaatctggaaagtatggtagtatcatttccagaaaagggagatgatttttagatataaattggtaacctgactttgaacacattgatttcaattagagtggaccatctcagtgaaactgtctactaagcagttgcaagtggaggatgggtaaatagtgtaaactctaggggaacagaagaatgcagaatcttttgtgtggaaagactcatcttttgtgggtaaaggaggaagggagccattgaaggagaaggaggagaggtttgatatgtgggaagagaagtgacatagaaagtagcatcacataagtcaagagaggagatagattcaagccaggggatgggaagtggtcaaaaatgaggagaaaagcttgaggcagtagatatctgtggggggcactcctgctctcctgacctccctgcttctggatgatatatcagaaggtactacttctatgattctatgatacgtttttataacaccacactaattctgacaccaaatgtgtttgtggtttattccccaaacaccaaccaattcttcaactctccagatgcaaactggatgtcctaccatttaattcaattctgatactaattaccaggagttagtacaggccccacaggttaaggactcattcccaaaagactgccctcactttagattccagtcaaaagcctgggtaacctgtacttctgtcaatgaaaagagtcaaactctgtaaaatattggaagagatttattctgagccaaatgtgagtgaccaatggcctgtgacacagccccaggagaccttgagaacatgtgcccaaggtgatcaggctacagcttggttttatacattttagggagatgtaagacatccctcagtacatgcaagatgtacattggttcagtctggaaaggcggggctacttgaagtcggggggaagtggggaggggattccagcttataggtagattcaaagatttcctgattggcaattggctgaaagagttaaattattgtctaaacacctagaatcaatagaagggaatgtctgggttaggataggggttatggagactgatatttctactatgcagaggaagcctctaggtagcaggcttcagagagaatagatcataaatgtttcttatcagagttgattctctcctggatcaggaaaaagaaggaatggggattctctacaaaatgtagattttttcctcacaagagacagctttacagggccatttcaaaatacgtcaaaaaatataattttgggggtaaaatacttcaatttctttcaggctgctatttgtcatgtgatgctatactacagtcaggctgaaatttggtgtcttattgctacaaagagtctgttttgtctggcttgtctgtcttaagatctgttttaatgttaatgctggtcagctgtgcctgaattccaaaagggaggatggtataatgaggcaagtccaactccctcttcgcatcatggcctgaactagtttttcaggttaactttgggtaatgcccttggctgagaggaagggtccattcagatggttgaggggctttgaattttatttttggtttgcataaccaaccacttataaagtcagggggttcccacaattcccctttggattgtataatttgctagaaagtctcacagaactcaggaagacacattactactactggtttgttataaaggatattataaaagatacacatgaacaaccagatgaagaggtacatagggtaaggttgggaagggttctgagcatagatgcttctgtccctgtggagtttggggtgtgccaccctcccagcacatggatatatttaccaacccagaagctttctggatccacaaaccccacttatggtttttatggaggtttattggggcatgattgattaaagcattggacattggagataaacttaatctctagcccctctgcctccccataggttgggactaggggtggtgctgaaagttgcaaccctctaatcacttggtctttctgctgactcacccccaacctgaagttatctaagagccccagccaccagtcatctcattggcataaactcaggtatgattaaaaggagcttattatgaatgatgaagatgctcttcttatacctatccttcaggaatttacaagggttttaagagctcaatgccaggaaccagagatgaagaccaaatatgtatttcttagtgtatcatcatatcacaaagtgttctagggtcttagagaaagagggtagctctgtggagtcaagattgtaggtcttggattgataactttactcaaaacctcacaaataaatcttaatcatggtcagtagcaacatccttgaagatggcaattctatcattttatttttcacatcattgtcagcatcatctggaaccgatatttactgaccctcagttgggtgcaaatacagaaacacagtcttggccaggtgctgtggctcatttctgtaatcttagcactttgggaggccaaggcaagaagattacttgagcgcaggagttcaagaccagcctgggcaatatagtgagatctcatctctacaacaaatttacaaattaactgggcatagtggtgagcacctgtagtcccagctactcaggaggctgaggtgggaggatcacttgagtcttgggggaggaggttgcagtgagctgagatcatgccactgcactccagcctgagcaacagagcgagaccctgtctcaaaaaaaaaaaaaaaaaaaggaggggggtaattaaggactcacttttttttccatttctccagtggaagccatccccagtggaagcttcattctcagggaggtagcaagatggctgtagcacttccagatcgcaacagaagcatgactattttgaggaaaaagagagaccacctcgtcctgtaggtctctcctaagagcaagagaacttcatggaagctttccagcacatttcccctcatgcctcatctgccagaattaggtcacatgcaaatacctgaagcaatcatttagaaccattcctgacagtttcctccaacatacttggctaaacagatgggtccctgaacaaaactgtggttctgttaggaagcaaaaagagggaattggactctgggtgggaccctgggtggagggtacattgcttatcagtttctaggactacaaagacatgtttacttaggatccctatttgaaagaggcttttaatctagttgtgggtagacacaccaaaaaatgacaaaagaatgtttagtaaggttctaaacacacagtaggcacctaaaaatattcactgaatgaatgaacacatactaatattacaccttgggtgctaagtgaataacacagctatgccacagaggctcagaagaatgactgctcaagaagttctagtgcaatgattcatcaaatttcacgaggtcttgtgacaatgcagatacccaggccacaacctccaaaacttggattcagtgttttcatggactgcagatttaacaagaatttcagtacaacctccattagtgttagggaaggtagctgcagcgtgtggttagggtaaataggtattgtttccccactcccaaaatcatttaataaatcatcaaattaaagacctacgagtttaccttctgatatttgtaaagtgattgctaagatccaaaaaatagtgtttggctgggtgcggtggctcacgcctgtaatcccagcactttggaaggctgaggcgggcagatcacaaggtcaggagctcgagaccagcctgaccaacatggtgaaaccccgtctctactaaaaatataaaaattagctgggcgtggtggtgcgcacctgtaatcccagctactcaggaggctgaagtaggagaatcgcttgaacccgggagggggaggttgcagtgagctgagatcatgccactgcactccagcctgggtgacacagagagactctatctcaaaaaaaaaaaaaaaaagtgtttaatagttcttttttttttttcttttttgagatggagtctcactctgtcgcccaagctggagttcagtggctcaatctcggctcactgcaacctccgtctcctgggttcaagtgattctcccacctcagcctcttgagtagctgggattactggtgcccgctaccatgcccagctaattgttgtatttttagtagagacgagatttcactgtgttggccaggctggtcttgaactcctgacttcaggtgatccacctgccttggcctcccaaagtgttgggattacataggtgagccaccacgtccagcctgtatttagtagttcttatcaaagaaccatatgtacaaaggattgtacaacttttcccttctgggcctaaatagttattgactgatgaaaaggtgaattatatctgaataatgaaacaatattttcaggtttgaaggtatttgctttattttagaatacaatcccttaaaattatcaagttgctctttgataacaaatggaaaacattttctcatatttattgttccctaacaccaatttattccattggatttcttcatagtttatagtacccagcaaccttatagctgtagagagagactattctttcctcctggattgccaaatttttgtttattgacagaaaactggccaggcacagtggctcaccctcctttttacactgtcttgcttctggtgaagtttcccatagatatgccactggcattctccaattaacccagctgacaaagactgggaccaagtctgtttaatttgtcaaatatggccttattaaggtgactataaacaagaatccacaaagcaggaggaagctatttgtggcactgacctcaaatatgcctgtcagagtctcagaatcaactccttgaacaaattcaagaagccaccaaggcttcatttaagaagagtcagggagtgggatctttccttaagtttctgtactgaccttttccctcagtccaagacattaatgtaggcatgacagaatgtattaataattgtacagacccctccgccttgacccacaaggaagaagtttaaagcaattgtattacgtataacacacctggctactcagttgaggcaaatgcgaatacttcaagggcaaagctggtatcactgatcacttcagctaaagtcaggggcaaattttgttctgcttcttctaatgggatgacttccactgcagcaacaagtggccactgatagtggataaataacaagcctgttatcactttggggagttcctccaggtaatcaaaggaagcttcattttggagaaatctccacaatcatctgagggctatgtgagctactagtggtgtacacttgaaggttttttatgatgacttacaaggtataagtcactatattttggggagagagtcaagataatgcctgccttccatactgtcctgggatgcacagggcagctctgggaacaaagtgttgtttaaaggtccgggcacggtggcttgtgcctgtaattccagcattttgggaagccaaggtgggaggattgcttgaggtcaggagtttgagaccagcctgggcaacatagtgagactccatctctaccaaaaaaataaaaataaaaatcagccgggtgtggtggtgcatgttatagctcctcaggtggctcaggggagaggaccccatgagcacaggagtttgaggctacagtgagctatgatggcaccagtgcactccagcctggctgacagagtgagaccccatctctaaaacaatttaaaattaaaattaaaaaaaagaaaatgttgtttacaattcttagcatcccccaaatgagacttataccattcggtgggcacagatcgacagtaacaccaacatgacctctgggtcagctgttaaatcaaaagttctaaggtcactttaaataactgaatctaatccttatttatggaggaactgcctgagggcagtcagcccagactctcctgtttgttcatgtcaccagcagggtgacattgtcaaccccatggaatgactgagcaatagcgataggaataaggctgaggaagacatctggaggtattgacagggatttgcatgggaggtgcaggagctggggctatcccctgctgttttggataggcttcttggtaagattaagaggagtgatgatcaaactgtggtcacagccatctggcaagagatggctgacccagcagtgagttaaatttaaggtgcttctcctaaggtgcaagtttaggagaatcacactaagatgttttccttcctgaagaaagctctggtgatgatttcaaaagacaatgatcattaaggtctccctccccagtcctggctgaggtctaaggtgttgttttccagatgctggggttgttgttctcaaactgtgcttaagatgagtattcattatttctgttggtaattttttttttttcaagataggctctcactttgtcacccaggctggagtgcactgccaggaacacggctcactgcagcctcaacctcctgggctccagtgatgctcccacctcagtccccaagttgctgggactataggtgcctaccaccacacaaggtttattttattttatttagtttagtttagtttggttttttgagatggagtctcactcagtcacccaggctggagtgcagtggcgcaatctcggctcactgcaagctccacctcccaggttcacatcattctcctgcctcagcctctcgagtagctgggactacaggcacccgccaccgtgcccggctaattttttgtatttttttttttttagtagagacggggtttcaccatgttagccaggatggtctccatcttctgacctcgtgatccgcccacctcagcctcccaaagtgctgggattacaggcgtgagccaccgcgccagctaaaggttaatttttatatttttttgtagacacattgtttcaccatgttgcccaggctgatcttgaactcctgagctcaagtgatcagcctgcctcagcctcccaaagtgctgggattacaggcatgagccatcaagcctggcctcctgttgataattttttaaccacaccctcccctttagtaaatcagttgccctatgtatcgttaactattttgaaagacatatgtttgtacattcaggaattaggtgtaacaacacatgggggactaaagggatgctgcttataatcattaaatacagtgcatcagtgttttgtgtttttttttctagagacaagttctcactctgtcacccagggtggagtgcagtgatacagtcatagctcactgccacccccacctcctgggctcaagtgatcctcctgcctcagcctctgtaatagctgaaactataggtgtgcaccactatgtctggctaattttttaatttttagtagagacaaggtcttgctatgtttcccagactggtctcaaactcctgggctcaatcttcccattttgttctcccaaagtgctgggattacaggcgtgaaccatcttgccctgtcagtttttttcttttcatttcttttttctaatcagattggtacattataactactaaatactaacttccagttctgtcacttttagactatttggtgtaaataagatgaaaattagatttagtccagaggcgactacttcttagtatagcacagtactaagaattgttcaaaatctttctcactgtgtcatttaagcaaagtaaaaagtagtaataaagggaacaaaatcctgaaatgaaggcgggagagcagaactaattttttaagaaaataacttcctatttctatgaacatttgctgctcctaagatttcataccatttctaaggatgcaatgacaaaaatgatgatttctattagttcaaggaccgacactatgaggaccagaggaaaggaactgacaggtttaaccactcagacaacacagtacctcttcccttcctcatcctctgtcataaaatgtttgaaatctggtctttcatttggttgtgaaatctattcagctacccttactgaatgcttaccaggtacaatgcatattcaggactctctggtacagggtggtcttgatgaggctgataaaatataatgcaagtggaattagctaaatgccaaaacatgccatgaaaattcagagtataaaaggagtatgtctgagagacaataaaataaataaatgaataaataagaaaaagaaaaagaaaaaaaaggaggccgggcacggtggctcatgcctgtaatcccagcacttttggaggccaaggtgggtgaatcacttgaggccaggagcttgagaccagcctggccaacatggtgaaaccccgtatctactaaaaatacaaaaaaaaaaaaaaaaaaaaaagaaagaagtgagaagaggctttacatcacagaggacatggggtcatgctaaagcatggcccaagggacccagacagccttggtttagaattcatacctgccacttactaacttactgagcccatagcacaggttgcataagtgcatgaacatgaatagaaatattctagaagaggccgggcgcggtggctcacacctgtaatcccagcaccttgggaggccgaggtgggtggatcacctgaggtcaggagtttgagaccagcctgaccaatatggtgaaaccctgtctctactaaaaatgcaaaaattaagaccgggtgtggtggcgtgtgcctataatctgagctactcgggaggttgagacaggagaactgcttgaacccgggaggtggaggttgtagtgagctgagatcgtgccactgcactccactctgggccaaagaacgagactccgtcccaaaaaaaaaaaaaaaattctagaaggatgtgcccaagtgatttttcctgagtggtagaataatgagtgatgtttatatcttctttttgcttgtctatactttccaattattaaacagttaataagtattaattgttaaaacaagaataaagaaaaacattgtttaaaaagctggtattcactgcttgaaccaggcaggtggaggttgtagtgagctgagatcgtgccactgcactccagtctgggccacagaacgagactctgtcccaaaaaaaaaaaaaaaaaaaattctagaaggatgtgcccaagtgatttttcctgagtggtggaataatgagtgatgtttatatcttctttttgcttgtctatactttccaattattaaccagttaataagtattaattgttaaaacaagaataaagaaaaacattgcttaaaaagctggtattcactgcttgaaccaggcaggcggaagtcgcagtgagccaagatctcgccaccacactccagcctgggagacagagcgagactccatttccaaaacaaaacaacacaaaacaagacaaaacaaaaaaagctggtattcactaaatacttgacatttattgatataacaatttctgtttctagtcttctcggcaagggactcaatctgtagaaacgtgtgaccatgtcaagtcagaaattcactatgaggctggcatataggagcggatctcctagctagtgagtgaacctgaggtgggaggcgggactcgactccagaggcagggctccgaatcggatggaggactacctaaaccagggcaggggcaaaagcagctttcagtcagacacacctaccagtgtgccatgtcaatttaccactgccatgggaacagccgggagttaccacctctttccacggcaatgacctaatgacctaacagttactaccctttccctagaaatttcctcaaaaactgttccttaatctgaatgccattaaaagtgggtataaatatgacccaaactgccctactctgtctactgggtagcctcactctgcaggagtagtcaccaaactgtaacaatgcctcttcaataaagctgttttcttctacctctggcttgcccttgaattctttcctgggaaaagccaagaatcctcatgggctaagctccactttggagcttgcctgccctgcatcaaacctagctgacatctcaaagtggcgatgtgactacaatttattatatgattcaattttattctcataacaatagaggtagatattattgtctcaccttacagattaaaaaactgagggtattatacattatgcagtaagtcatgaatttgggaatctgagagtgttataagtcaagtaccaggtttctcagcatgagcacggttgacattttggatcagataattctgtttggggtctgtcctgtgcattttaagacgtttagcatcattcctggcctttacccaccaggtactagtggcatccctacccttaggctgtgacaaccaaaaatgtctcagacattgccaaatgtcctcaggttgagaatcatgggtctagtatattctattcattacccttgagcaatgaactccgaaaattcaagatataaacctcaataccattttcaacacttcaccttcacaggggcttagttcttaatgaaatctttaataaatggtgttgatgatgaaaacaaacataaataatgatgtaataaacatattttgcataaatacttttctatcttttgcatgattaacattctaatgacagtcaaatggaacaaacattttaaaggcctctcattcatactgttaattgctgaccaaagagttgtaccaatttacatttctactagtagtgtaagagtctatcttaccacaccctcaccagcattggctattatgtgtatatttctatctttgctaatatgagttatttctatttattttaatatttgtgtttataaaattttgtattgttcttatttatatttttgagcactagtaagagtgaatattccccgtatgttatagccaatagcacttctttttttcttaactgttttgtgctttttgctcatttgtcttttggatggtcttagtattgttcctttttttttgagacagagtcttgctctgtcacccaggctggagtgcagtgtcgctatcttggctcattgcaacctctgcctcccaggttcaagcaattctcatccctcagcctcctgagtagctgggatgacaggcatacaccaccacaccttaataatttttgtattttttagtagagacaaggttttgcaatgttggcctggctggtcttaaactcccggcctcaagtgatccgtcttccttggcctcccaaagtgctgggattacaggcatgagccaccgtgctcagcccttagtattgcttttatcaatttgttcaagctctctgtatattataacctggatagcatatatgtctacaaaagaattttgcataaaggcatttgagcgtagactttattaaagctctgggaagatggcaaaggatttaaatcacagcaactgaagtaagctcaaattgagttctaaatattcctctttttataagtcccttgtcatttgtctttctcttttctctttctttccttctcttccctatgcctctctcccatctcttcattctccaatttctgttgcttttcagtggaaactagctcaagttatttctttggtctttgcctccatttaaccatactctcagtttttcttccaccctagtggaagatattagtttatcaaggtattttcttaaacaaggacacttagtttcctaagggaaatgccagtaacaactttcaagatatcttgactattataccagagtgaaaaagagttctgaatcctgttgccctatttgcttcaaatactttctccactttgtttaactaatggatactaggcttaatacctgggtgatgaaataatctgtacaacaaacctccttgacacaagtttacctatgtaacaaacctgcgcacgtacccctgaacttaaaataaaagttaaaaaatatttaaaaaattaaaaaaagaaaacagtaatcaaaaaacaaaataattggttgctggtatgattccatcctgcacagctgttctctggagcgtggttgtttacctctgcctggcttctctcctacctaagtgcttgccgccacccatggaagatttgacggacatggacatcagcctcctgaggccccagaactatctttttggttgtgactagaggccaacaaagattatcactttaaggtggataatgatgaaaatgagcacaagttatctttaagaatggtcagtttaggggctggtagaaaggatggattttatattgttgaagcagaagtaatgaactatgaaggcagtccaattaaagtaatactagcaactttaaaaaggtatgtacagtcaatggtttatcttgggggctttgaaataacattgcctgtggccttacactcagtgtgtttcagggcctgggcatatgagtacacagcacttaacaggtatgaaggaagatacaaagcaggacatgaagaggagggagatgtgagacttttcagtatatctggaaagtgatctgcccctggaagtgggtacatttctacaagaaaaaaataaaacttcttgctgatgaaaatcatgatgatgatgaagaggaagaacattttgatgaagggaaaactgaagaaaaagctctagtgatgaaatttatacaggatactccatccaaaaaatgcacaaagatcaaaccaaaataaaaaagactcagaactatcaagattaagaccaaaaggtcaagaatccttcaaaaacagggggaaaaaacctcttaaaacaccaaaaggacctagttttgtagaatatattaaaagcaaaaatgcaagcaagtatagaaaaagttggttctcttcccaaagctaagtgcatcaattatgtgaagaattacttctggatgaccaactaggaggctattcaccatctctggcagtggaagaagtctctttaagaacacagtttaggccaagcgtggtggctcatgcctgtaaccctagcactttgggaggccaaggtgggcagatcacttgaggtcaggagttcaaaaccagcctggccaacatggtgaaaccttgtctctccaaaaataaataaataaataaataaaaatacaaaaaatttgccaggcgtggtggtggatgcctgtattcccagctacttgggaggctgagacaggagaatcgcttgaacctgggaggcagaggttgcagtgagcagagatcacgccattgcattccagcatgggcaacagagtgagactctgtctcaaaaaaaaaaaaaaatagtttaaacagcttgttaaaattttctttcttctttttttttttaaatcttttaacccaatagttcttttagagaaaaaaattacctgtcatttcgttaatagttcttttagagaaaaaaattatctgtcatttcatttctgtaacagttgatatctaactgtcctttttacaattcagagtgagaagttccctagcacgttggataaatattgtccaggttccattgccaaaaatgtgttgtccaaaatgcccctgtagtttttaaagatgaaactccatcgtttgcttgtttttttttttgagacagagtcttgctctgtcactcaggctggagggcagtggcactatcttggctcactgcagcctctggctcccaggctcaagcaattctcctgcctcagcctcccaagcagctgggattacaggcatgcaccaccacacccagctaatttttgtatttttagtagagatggcattttgccatgttggtcaggaaggtgtcaaactcctggcctcaagtgatctgcccacctcagcctcccaaagtgctgggattacaggtgtgagccaccacgcctggctctttgcttggttttcagtatatatgtatgtatggaatattatgataggacatagtagtagctgtggtcagacaaatggaaatggtgggaagacaaaaatatgtaactgaaataagctcaatattttaataaaggaaaaaataaattttttccccggaaaaagttgtaagaaaaaaataaatcttctcccatgcatcttaggagtgctttaaacttagatgtttggagatgagtagtctttagataggtggaaatggaggaaaaggtgtgacatgcccatggctacctagtatgcttctatgcatagtacagtttttaaaaagtgagttgcttctctgtaaaaacatattactttactattagaaaccactggagagcaatcatgccctgcttatattaaacatctttgctagatttttatttgattttttgagatggggtcttgctctgttgcccaggctggagtgtatggtgcaattttagctcactgcagcctcgaactcctgggctcaaggggtcctcccacctcagcctcccgagtagctgggactataggcatgcaccaccatgcccagctatgtttcctaaatttttaagtgagatacattaaacctcataaaaattagagctaacatttattgaacactctgttgtactgcctcccaagtataacatggtaattaaaacactggaggccaggcacgatggctcacccctgtaatcccagcactttgggagggccaagtgggcagatcacttgacctcaggacttggagaccagcttggccaacatgaggaaaacccgtctctactaaaaatacaaaaattagttgggtgtgatggtgcacgcctgtagtcccagctacttaggagggcaaggcacaagaatcgcttgaacccgggaggtggagtttgcagtgagctgagatcgcaccactgctctccaacctgggcgacagggcgagactccatctcaaaaaaaaccccaaaactaaaaaaaaaaccccaaatgttggaaagttgcgcgaggtataattcagtttagaaattaagaatccaagacaaaaagtctgcctcaggaccacacacaagcacgaagaaaccaagatagttcaagcatggaccttaaaactgcactgtctaaggctgttgtcactggtctcatgtggctatttaaattttaattaaagtgaaataaattttaaaattcagttactaagtcacactaaccatatttcaagtgctcaatggctccatgtagctagtgggtactgtacagacagcacaggataacatttgcatcatggcagaaagttttagtggacctaaccaaaaaaaaaatgcctttaggctcatttcgtgatggcagataaaagcctctggaattctgataagtttctgaagccatgttatagaactggttattgtaattgcatgaacttcatccaaaactggtgaaagcgtcaggttggggatagtctggtggttgttactttctgtccaacctaatactgaggctctgagaaattctgtggtgaatttctgtagggggacacagcagaaaaggcatagtataggtcagaaaacctgggtcctataatacatagtaataatgacgaccatttactggttgtttcctatgtaccaggcactgtgctaaccacaggcttcatttaatcctcacaatacctgtgtaaggtattattaccaccactttgcatgtgaacaggctgaaattcagaggagtaaggtcacacaactagtaagtaggagagcctggattcaacacctggtatctattcccttgcgctgaacaactccgtgccctcactttcttcatctgtagatctaaaaggattaaattagaacatctcaaaatttctactacttctaaaactctgtgttctaaattaggacattactatctatctccccaagctaatgaaataagcagggttcctgggaggagcttgttacctatttttctccaaaggagatgctttcccctgtctatgcctctgtcctaaaacctttggtttcccactatctaatgtggtttcaactatctatgaggcgctttcgtggcaaggagtgattctctccagtaggcaatcctaagaacgagcgcagtgcttggcgcacagtaaatgctccatggaccatttatgaaattaagtctaagtggacttcaggaaaatgtgaatctgctaaaatgaactactagccagtatactaggtagaaaacccagctgacgaagaaaaccccaagtggagaagcccttgtagggggttggagacaatttctgacccgcagaaacctgcagtggcgctgacgtttacaagtggtggacaaaacgccacttgcaacactggaagaagcggaaaaccccacccactctggaacaacagcgatcagccccgaatatagggtccccttgccgccccgtagcctcctagtcccgcccctctcccaaggcccggcagtggcagcggctgcggctgcgcagtggcgcgggcgtaggcggagcagcgcgcgccgcggtcagctgactgctgggctggcacgtgacttgttctgtgttcgcttgggtagaggaagccgtgaggccggagcttaggtcgggaagggatggatcgctgagccgatagcgtccgctaggctgtctgcctcggtacctgttactgctgctacttcctcgtttgacaccttcctgggtcagtgagcgatggctctccccggatggggagtcctggtcaggccgaagcatgagctccggtcgctgcctgggagggacgcgggtgggtgcgggggcagagaccgtggcgttggagctggagctggctgggtggctgtgtctggtttctcggcgccaattcaccgtcttgggcctaggttccgtctctaaggaagagaaggagggaaaaagagaaagagctctcgtgggtagttaatgacaggcagaaaggagagatacagcggtctgggatctttcttcttgggtaggaatgcacgccgcctgattgattgaggggaatgaagtgataggtccaggtgaggctatggagtggtgtgtgtgaggtcacagctagcgcaagtgccttcactgggtgtgtgttggggggggcgcgggtgtcgggggtcgggggtggtgggatgacagtttaaaggcctaggagcccctaactgcaggcaaggaaccctcacagagtacacaaggtccctctaggaatgagaaagaacaggaatccagagaactcaactattttttagtagaatgggggagggtaggcaaacaaaacagaacaaaacaaaacaaacccctagaaaagaacttggtgagagtcacataaggcatattgaatcacttgagaaacaggagtaagggggaagctagtattcttttcagaggaaaattctggtatgttagggaaaaatcacatgcttcagtgcgagcccagtacttagcgccgctctgggaatggaacgggtgggatgtgaacagtctatccttaggagttagcactaacgttggagagaaaagtctacacacaggacacgttaaaatacgatgcagtttatgtatacttaccaaaaagagaatgcgaagtgctttgaaagtgtggagcaacgacacatgtgtaaactggcactatgggaagatattctggaggaaagaaaacttgagtcttggcaagccctcaggatttgaacaggttgagagaaatggggataattttacaggcagggaaagccacaggatttgaaagcctgaagatgggggtagggaatgcttctggtggagtcagaagtagcttttacagtggattgcactgcggagaagtgggaaagaaagttgggagtcaggtaacgaggacttttgaatggtagtcgtttacttattcatgcaaataatgtgtactgaatacatgctgtatgcaggtacagtgctgatggtagggtttagaaaattgtctttatagagcttacaggcaagcagaggggatggattttaaaaatcaagcaagcgtgaaatgtgctttgaaggaataacagtggtatgaaagagtgtagtaggggcatgtgtattatggaagattttaaaaaggcattgctaagaatatgactttttaaagattaaaacaattttatttatattcttcataccctctcgctctgagagggtatgacttttgacctgagatctgaaaagagactgaaaagggaatgtgaaggtgtgagtgaaaagaacattccaggcctggcagggtggctcgtgactataatcccaacattttgggaggctgaggtgggaggattgcctgaggccaggagttcaggaccagcctgggcaacatagtgagaccaccgtctctaccaaaaataaaaaaataactagctgggagtggtggtgtgtgcttgtagtcctagctgctcgggaggctgaggcgagaggatcatttgagcccagtagttcgaggctgcagtgagctgtgatcatgccactgcactccctcctgggaaacagagctagaccctgtctctgaaaaacgaaaaaggaacatttcaggctgaagcaacagcgtatgtcaaggccctgaaatgtgaagaggaagaaagcttttcagcctttttgaaaggctagcatggctgaaacggggagggagagaggcaggtggagaaagctggggtcacgccaagcagagcttttattctaaaaacagagggaagccagtgaagattacaggcagtggattgagacaggttgtggctttttttttttttttttggtgggggggagataatgtggagggtggcaaaagtgaatgaggggagacccgctcaggggaacattgttgtaatccactgaaggatttgaagacaagataccttctctctccactgaggacttcagaatgtttaactgtattcacttttagagggttcaggacttggggaagggaaagaatgattcgattctatttgtacccttcacagggtagtcgtaactaccctcgaggcagtcctgaagtacatagcagaggctcttttgcaaaaatttgttttggcttttcaaatttatccttttgtaaggtcatctatttcagaatatcttttattgaaatatagttacagggagggatcactttcatatttattttgttctcacagttctttgaaagacagtggatgaaaatgctattcattgtatagatgggaacctggagctagagaaacacgtaaagtgatttggctgagtccggagtaactgccacagttttctgactgctgatgtattcctgctgattacctacacagtactaaccacagtcacatctagagaaaagggcgagttttttgaagtgcacagtagtctttgattcagcatttttttttggggggggggaacttctccctgaagagtcagcacttttgatgaactttttctagtagaacagcttcaaaggaattggcagtggtgggctatgtcttatctataatcttggatagagctgttcaatttacagttcatctggaggaaataatgaacaataaggtgaactgaaagtgctcaggttgtcaatcacagttctttggcaaaaagtgagtctcaaattatgctgaagactgagcctcagggttctgtctcagaagtcctggatctttttctcttttggtataccttgtagggactagataaaatctaaagaaacagtactcaggatctaactaaatgctgagagctagatagtgtaattcagcttttaaaacttggcacaaaatactcatttttatttttttggtatattagtcttaggagcctcatgtacattagttttttcaacctaaaaagaaacttcagggcttcaaaaatctgattttgtgattatttccacaactcacgagataataccattggccaactggaatgccaaagtaaacctttgccaaaggtctccatgtagtttacccgtccctaagcagcaagtcttcttttgaacttggttctgcttaggagtactacagttttgactgagtacctcctacttaaaattttgctcttgtacatatttaaatctgtctacaggttacatctttttcactctttgggtgtggaattatatatcatttataaattaattcatgttagatttccatttttcatcaatttttaaagacagacatagtataaacattagcatagtgcccttgggacgcttaggcagtgaaccaaggcagtctaaaatttcctattgacatgagtgattcttggaactagaaatttcaaactatattcttgatgctgaaacaaaattttttatccagcaggacatctacttctaagattataccatgtgcaaatgtactatgcgtttattgagttaaaaaaatgagccaggtaggcagtggaggagaggtgctttggttactatgcatttattgagttaaaaaatgagccaggtaggcagtggaggagaagtgctttggttacatcggggataaaagagtattaactgtatatctaaaatgtggggtgtgtgtgtgtgtgtctgtgtgagtatgtgtgtgtatttgaaaataaaatgctaggtaagtgatgttttatagaaagggatcgatggatcttctaagatattttaaacagactatcaatgaataggaagttgtaaattaaggcgtgttaacaggtggtttaactttaccatgaaaggttttccttttgaatcagcccatagtttagtgtttctatgtgggtgctattggcagtttggaggtctgtttcgcccctacccactaaatgctgattagcgatctccacattgggacaacccaaaatgctcccatacatttccagactcctcctggaggagagaggcaccatttggtgcaaaacatgcatgtggtgtcagtttatttgttggacaaatattaagatgttgaggttacagaggttaaaagtaatattttaataaactgcatataatggaattcaagtaatttaaaatctagtgtttgatgttttaatgtaactcctttagtgtaaaattactgaaactatatcctaatatttctttgaggcacttgtcttttgtaaaactgcatgaataactcaaatagagtccccttaatcccaataaaatgtagtcactaaatgtctttgggcaactaatttcaccagctgttccctcatttgcaagtgggggtggtgataacacatcttgtgagggaattaaatacaaaattgctttagtagatgcaagtgcttatcactgggcacaacatgtggtacatattcagtgatagttgttaccagtaaacagaatctcaagcttacttagggtcatgagttggagaaaactaatcttaaagtctttaagttggtgaatttcaggccaaaatacattgtattggagatatcagcaccttctagcagaatgtggtaccgtggtccagtcactattataaattgccagccatgaagaaaagggaagtcatgttttgggagccatgagtgtagattcagggaatcccctggcatggaaggaattatttgcccactgggtcaccgctgagttgcctgtgcagaggaggagtctctagaagctgagaaggttttggtgattacttgcagtaatgggtgtacgacagggccctcctggccatgtctgccaattcagtagctttaccagaagttactagaaattttccaacattgtattatgtattacatccccagcccccactccacaatgtcacagtgtgtttccagtttttgtgataggtatctgtgtgaaagtaaggctttgcttttacagattgctttctaggcaaatgtggaataaaaaaattgtagttgataaaatgagtctaataaagattaaattgcctttcatatttaagtatatttatggcaagaaattatggtagttttaataggattatagagcatttatgggtattgtttccattgaaaacaaaacacggaatatttaagatttatttaagaaaggcggggctgggtgtggtggctcacgcctgtaatcccagcactttgggaagcggaggcaaagggcgggcggatcacttgatgtcaggagttcaagaccagcctggccaacatggtgaaaccctgtctctactgaaaatacaaaaaatagctgggcatggtggctcgtgcctataatcccggctactcaggaggctgaggcagaagaatcgcttaaacccaggaggcagaagttacagtgagccgagatcgcgccagtgcactccagcctgggcaacagagtgagactccgtctccaaaaaaaataaaaaggcatattttctgacagttttaaaatctcatttcgtatgaatcatggacgtattccttgaaaggtaaaatcccccttctagttactgaaaatgtttaaacaagttgtattatgagcaagcccctcccacaatcccaattaagatgcttctgtttcgaaggatagaatttttacattcaaagaggaagcagttatttttactttttatatgtatggtgttagtgatttctagggtaggatgtggcaactttttaactgagtggattgtggtaaatgtttcgcacagatcaattctgttaaaagttgatgtgcacatttggaaggctatgtgatatttcactgatagctgaggtatgccttcttgtgcttcttaaaataagctgctttagtaaacttggtattttcaagtactgaaaaggaagttgttttgcatggagaccaccttctaggcttaatttattgtgaaatttaatttactgtgaaaggtgattgcatttcagagaccacggtttggttttcttgaaagcattgaaatcagttaagtgtcggagcacttagtggagtgcggtactgttttctgtggttgcccctatcttgggtcaatcccataccttccattcacagaagcagtgccagcagatgtcttgttcaggcttataaccaaccccccctcaccttttatgttgtaatagttattgttttattgtctttatatgcaaatcaattgtggtaggaaaataatccatagccttcaaactctcagaagtgggagataaagtaaataaaattaacagtcccatagctttggatctagggttttttttttttctcctttcctcccacttttttcccttccatgttgaaaaataattgttacttttttttttaagcagcacacttattgcagtcagacaaaatagaagtgcctacagaattgactagtgtttcccttgtgcctccctatgttcttcagtgtttttttctgtcttgacatctacatgaagtcttcctcccaccctccctgcacacacacagacctgcctgctcgtaagacctgccaccctctcccacccccaattgtaagctccatgaggacagggtctacattttgtttgttttgtttctcagagtctattacagttttgggaacttaagtacccaaaatattttgtgagatgaataagagctttaattgagaacagttacagtcagatgagatgtgtgacaaaacataaaatagatgtctgcctaatgctgttaatgacatgagtgtaagtagacatgtgggagaagtagtgggattatagtaacaggtttggtgcatggatggacttagttgggaaaatcattttgttaagggaggcttgggttggcttaaactggaagagagaaatttgttttgtgcgaaacgagcaaaggcagggtaggaaagggaaggaggcctgaggtcaagatggataaagagagctcaggaggaatgcgaggataaggcagaaaaactcagacagggatgctagtagtgatgacagtgaagattggcagatttgagttttgtttccaagaaagaagcaggactaggggtgtctgttttggtgagttgttcagccttctgtccatagccttcaagagtattgccatttcttgtaacattaaatatactgtataatcatagaaatgcctgtcttgttacagtggttctgaaatttgggtgaattacctgagggacttaaaataggaaaaaagaatcctgggcctcacctagtataggttcaggtagtgagtataggagcagaagaggatcctggatattgtaatccaatcctctcattttacaagtgaagacatttatgcagacaattatatgcagaactgggattagattccaagtcttcatatcctcagcgcagtgctctggcgattacattgtgcttcctgaaattgacatttgggttttctttgactatgattcccagtgaggtaaaagggccgtttaccaactttgatcacatcttcagaagtagctacaattaaccagctttgcccttctcttttgtatgaactccagggctctttgttatgatgccatttaatggtctctaaacttttcagtgttttcaaatatgaggatactgccctaataaggatgcggtgggacatttttttgtttgtgtttacatgtaataatttattatttaaaaattaggaaaaaaatatacagaaaggatgaaaacaaacattcataatcactcccaagagataattgttgacagtttttttttttataatttaatgtttatacctatgcatatccttattttctttcttaagatcggcatagctaggccaaaggatatgcacattttgtgggttttgataaatattgccaaattgtgttccagaaattgtctatcttttgttctttcttccttccttccttcttttctctctctctctcttctttttttttttcaagaccctctgtcacccaggctggagtgagaggcgtgatcttggctcactgcaacctctgcctcctgggttcaagcgattctcttgcctcagcctcccaagtagctgagattacagatgcgtgccaccgtgtcttgctaatttttgtatttagtagagaaggggtttcaccctgttgcccaggctggtcttgaattcctgacctcaggtgatccacccgcctcagcctcccaaagtgttgggattacaggcatgagccactgcacccagcccatctgttgtttctcatctgcagaattttcttgggctcccatgtgatgtgtaattattttagattattttagaaatagatgatgtagtatatctaagatatattttagatattttattaatgatgacaaattgttacagctgtattcatgctttattttatttaaaaaaaattttttttttttgagatggagtcttgctttgtcgcccaggctggagtgcagtggcacaatctcggctcaccgcaacctctgcctcccgggttcaagtgattctcccacctcagcttcctgagtagctgggactataggcatgcaccaccatgcccagctgatttttgtatttttagtagagacagggttttactatgttggccgtggctggtcttgaactcctgagctcaagtgatccacctgtcttggcctcccaaagtgctgggattaaaggtgtgaagccacttcacctagcctattaatgcttttaaataaattcatgttttacttatcaagatagcacgccatacatttgcaaattaatggcacataagtgaatgttggagacatttattcaagctgcagctgttttttttttttaaacaaaaatgaacatttttccttgttagtacaaaagcaatacatgttcattgtgttccatttttcacaaacacagtagtactccagtcttttagcctagatttggtaaatttttggcatttattgttgtcagtcctgttttctgttaaatgttaaaacatggggctgagagaggctgtgaggttgtggctgaatccctgcatagaaacaatcagaacaattagaaaaaccgaacactcgtgaataatacatacaacaaaaccagatgagacttcagtttttgtctgcgatggagtaactggtaccatatttgctttcccaccataaacaattacaaatctggacaagatatattaaaaaactgcttccagacatcggacaataggcagtacaggagctgagcgaaaggaaatgagctgtgtaattcctcctgctttttcctgtagacactctctgcaccgtgttttaggaagggaacacccgtgcagagcatcttggtcttgctgagtcgaggagactggacttggggaaggtttatctggctggaatttgcaggtgggattgacagagagagggagctaggcagagaaataaacaccagaaacttatggggggggtctctgcaggagatctaacaaagaatgaccagagagctttaaactgaagaattgccagagcttatggtgctgggaggcatttgaattctgaccagatatgggagagagaacttattgaatacctgggacattcaatagaatccccaaaaggttagaccttagtatcagagactaagttagccctagagtaaggccttagatctatcctaacaatgtttgaaaacaagccttgggtggatcaagctgatcctcccctaacttacctgcccaccacaacaaagtacaacactcttaaaaggaagacagcaaagtccagtgatacacagtgcagcatttttacaaatatgctcagtgttttaacagaaaacatgaacataatgaggaaagaaatggaagatattttaaaaatggaacttaaagcagaaaaatacataagaagtgaaatattcactggtgagaagaataacagattagatactccaaagaaaaggtcagcaaactacaagatacagcaagagactgtgttagtcttatttgttgccataaaggaatctgtgagactgggtaatttataaagaaaagaggtttttttggcttacagttctgtaggctgtgcaagcatggcatccggatctcagcttctcatgaggcttcaggaagctcttgagtcatggcagaggggaaggggagcaggagtgtcacatggtgagagaaggagcaagagtcagggggaaggtaacagtcagatctcatgataacttcttactatggggagggcattctctttttaacaatcagatttcaaggtaacgttactacagggagggcaccaagccgtttatgagggatctgccccatgacccagacacctcccaccaggccccagctccaacattggggtttattcaacatgagatctggggaggacagacatccaaactatatcactatccaaagtaaaacacagtgagaaaaacaactgagaaaaatgaatgaaagctcagtgacctgtggagcagtatcaagtggtttaacatacatgtgatcttgtttcaaaagaaggaagtgaaggcaaaaaaaattgaggaaaaataatggctgaaaacatttcaaatttgatgaaaactatgaatggatccaagaaactcaacaaactcgaagcagagtaaatacttgtgaccttgggataggcaggtttttcacatgctacagaaagcatatattgtaaaaaaaaaacaaaaaacaaaaaacaaaaaaaacccaaaaactgataaatcggacattggcagaattgcaaacttcttttcaaaagcatcattaagtcaagccacagaatgagagaaaatatgtaaatatgtatatatatttcacaaggaaattgtgtcaagatcatataaaaattttgtgcaactcaataagtgaatccagttttttaaaaactgggcaaaagacttgaatagaaaatatacaaatggcaaataacatgaagagctcctgaacttcattagtccgcatggaaatgcatcatggaaatgcaacataaccctgcaacccactggaatggctaaaaatgaaaaggccaagaacactaagtgttggtggagcatctggaggctgaatactttgctaataggagtataaaatgttatatatctgctttggaaaacagtttgtcagtctcccctctcctcccctccccttcctttttttctttttctttttcttttctttctttcctcactctgctgtccaggctggagtgcagtggcatggctcactgcaacctccaccttttgggttcaagcaattcttgtgcctcagcctcatatgtagctgggattacaggcctgcaccaccgcacctggctaatttttgtaattttagtagagacagggtttcagcatgttggctagactggtttcgaactcctggcctcaagtgatccacctgcctcagcctcccaaagtgttgggattacaggtgtgagccaccacacctggccaatttcttataaaggtaaatatacattgatcattcaacttagaaattctacttttagaattttttatccaagagaaaaatatatcttcacaaaaagctttgtagaggaatgttcatagaatctctattcttagtggtcccaaaccagtagtaacaatccaaatgttcatcaactggtgaatgtatgaacagactatagtagatgtatgtggtagaatactaagtaataaaacagattgaactactaatacatacaacacggacagatatcaaagacttgctgagcaaaagccaggtacaaaagagtatctaatgcatgcttccatttacaaggaaattctagatcaggcaaaactaatctatagtaacagaaagcagaccaacatttgcccagggctggcagtgagatagggattgactggactgagtgtgagggaaggtttggggatgatagaagtgtccttaatcttggttttgacagtgctcacacaggtgtatacatttgtcaaaaactcatcaaactcttacaatgggtgcatttaattctatataaattatattttaataaagttgattttatagaaaaaacgggaagtgagggaagctaaccaactataatccaggtgcttgatgttatctcatttaatcctcacagtaatttttattgaagaatattcagcaaatatcttctgagattctaccatgctggtctctgtgccaggtactgaggataaagtggtgagcaaaaactatcatgatttccacttaccgtcctgggcagtttatttgaaagacagatactagtaaaaagtgctcccccacccccagagaaatactacaaagaaggttctatgagagcatataatacattcatccttagcatataatatatgctgtcatatgatatataatgagacacatactacataatataccttgtataatatataagatgctttatgtgccctggtttctttgtaactactacccctctaatggggtttctctaactactaagtgagttaatacacgtgaagtgttttgacttgtgctagtagataggaagtgcccagtaagtgttggctgctatgaacatttgacagttctaattgtctaatactgcaggggtacacctatactaactcagggaacagtggagtaggactacatattggggaagagatgataagtttgactagaagtgttgggttttagctgcttttgagacattcaggtggaaaatgtcttgtagtcagatgtggatactggttgagtacaactctagatgctgcagagggccctgggctggagacatacatttcagaaagtgtccagcatctagactagaattgcctcaactgtagagatcatcatcaagaaaggtgctatacacacacattcacacacacgcagaaagagaagaaggacatagacctggatctgagccttgagaaactacgatttaatcagggtgcctttttgatcatcatctcctctgtttagcatatgattttgctacatttaggcctgacttccttcgtattcaagataaaataaagggaaataattacgagtaaaaacaagcagtggagaaggtggtgtcaggttcttggcaagttgataacaaatggccactaattttgacaatttgtttccttgcagctgagagaaaaagggaaatatgtttagcaatatggattccattttccgatgaataaagacatacatattcatctgcaaagataaattttgtttgaaactaaacttaaattgttcttaaatttcaaggataatttttttttttttttttgagatgaagtcttggtctgtcacccaggctagggtgcagtggctccatcttggctcactgcaacctttgcctccagggttcaagtgattctcttgcctcagcctcccgagtagctgggattacaggcgcatgccaccatgcctggctaatttttttgtatttttagtaaagacatggttttgtcatgttgggcaggcaggtcttgaactcttgatctcaggtgatctgcctgcctcagcctcccaaagtgctgggattacaggtgtgagccactgtgcctggcctcaaggagaaatttttttacctgacttgtgtaagtgacaagttgagagcggtcatagtttaaaaatggaaaaaacagattttgcaaaatacttatgatgttaactgtcataggaagttgttacattcctccttaggtacttaagtagcttgtctttcctgttaggctctttacttagagttagtttgctttgacgaggggtagaagaactgaggccatggctttgcctgaagtacagataggttctttatcaaaccctcttttttatatttttgactttattcacccttgacataaaagacaaaggcttacttaggaacctgcaactctaccaatttttaatttttactgtaaaataagggttttctggaagactaaaaaacacttttaaaaaacatgattttttttgcgtttatctctaaatcagacgttttgattggttccatcattgttgtatttgaatttgaattttatttattaattcaacaggcatttattaagtccctgctattgccaggaatttagtgtattctggctctcagggtttcacagagaagaagatatgattctagctcttcaggatttctcagtaaggtggagaggaaaatatgttataaaaatgagggagaatacgatgagtgcgtagtaggggcatttataaagtataagtaagcaaaggatatttctcatctgggatacgggggagagtcttgggaggtaggatggggtggggcagcagctaatacaatcatccgcaggaagggcggccgcatggaaaggggaaggtctaggtacattattttattcatactttccaacagctgggtgaaaagatgtgtcgtgttcccactttacagatgaggaaactagtaagggggtagagtcagagttttaactgttgcaggactccaaagtttgtgttccttcctccatgatctggcaggtccatcgaatctctagtatctgatctctagtctcaaagtatactttgaatctcgaattttgtgtgtgtgtcctttcgtttggaggaatcgttgttccttctagaaggtaggatagttttggatgctgggtgatgctactttagaaattgtgatgatcctggacgaagggaacaaggaaaggaagcttggatccctttatcagaattcactggaccaacagggtgccctgagcctggaaccaaacagggtgaaggtgttgaagcttacatgtggatttctcttcaaataggagagcccaggtgcaccagagcacagaacatcttttctcctagtgtgacacaatagagagaacatggtctttagagtcaaacacaactaaatttgaaccccatctgccagtcgtgcagccttgggtaaactactaacctctctgtgtattactgcctatctcatgggttgtagtgagaatggaataaaatgatgtatgagaagtgaaaagcacaacatcagacttagaaggcaccttttccttcctttcctcctcatcttccaacacctaggctctagggaggtctcagttaaaagctagaattatgagcacagtggctcacacttgtaatctcaacactttgggaggctaaggcaggaggattgcttgaggctgggagtttgagaccaacctgaacaacatatcaagactccatctctacaaaaaataaattttttaaaagctaaattagagaacttctatcatatttttagactgtagttttgatcagaatttatcatgacattatttcctttgatcctaataaaagctcagtgaagtagatagggcaggtattatttatagatgagaaatggggtcctctttcctattccttgaaatcctttggaagcctgttagaagaaaagattttctggaactctaagtagtatgatagtgacatctactgtaatagcttgtattattacaatctttgaggaagctgcagtttagataatttagcacaatcatcaggaagaatttaacagttgattttattacctgccattttggggggagaggaggtataaaaatgtatcctttgatatactaacagaaaaccacttgcataaaattattataataaaatctcaatttttccagaaaccacgatcgcttagatctggattacaaaaagaggtttaaagatgctattagattttctaataactgaaaatgttaaagttcgagacagtttgtgctaaaaaagctagattcgctaagtgcgagagtattaactggaagcaaccggcgataggtggtgatgtgatccaggtgttgtgaagaacagagacaggatgacaagaagacaggatataggtccacgagatttcagcagggatttatttttaaaagcaacttcttgagataggttctggagttagtacaggtgtagcctgaactcccacacttgcaacattatgcagttagattgttggacatattgacccccgaaatacttttttaaatttattttttaaaaataaaaataattaaaaaaaaagagagacagggtctcgctatgttgaccaggctgatcttgaactccagagctcaagtgatcctcctgcctcaggatccaaaaatacttttaaaataaatcccaaactctaaaagcattgtctgcaatgtattatacttggtcataagaagatataaacaaactagtaagcatttctactaggtgtaaaacaaaaaggttgtactttgaggattaatttggtatctagattattctctgaatatccattttaaagttcactaaaattttatttttaataaatttgccatgcaatgttatgttttaacttgtaaattaaatacattctcataaaaattttaaaaatatttagttttgaagtatttcagatatacagaaaaatgttaaatattgccaattatgtcatccatgcagatttagcaagtatgaatattttgctctatttgcctgattttttaaatgaaatcttacctacaaaactaaagctcctttctcctatgcatattttagtattttctgtaagtatatataactctgaacactatatactattatgtgtttttcagttgtggaaatagaaactcttactctgctggcaggaacttaagttggtaggggctttggagaacaatttggcaatacccaaaagagttggcagtggtctgtgtcagttgtctcatgctgcacaacaaactaccccaaacttagtggcttaaaacagtgatttcttatttctcctaattctgtgagttgctggggtagtccctctgcttgttttgcctggactcattgatgcagccgcattcagctgggagattggctgggctggagggctcaaaatggcctcagtcacatgtctggtggttcatgctggttgttggttctctacatgtggccttatcacttgcaatagacttccttatgtggtagtctgagggcagtggtccaagacgcaaggcctcttgaggtctgagccctgaactcgcatagtgtggcttccatgcgttttgttggtcaaaccaagtcacaaggccagctccaccttttgatggaaggagtggcaaagtcacactgcataggagcatggaaagacatctcgcctccatctttgaagacatatcctgtaattcagctattttacttttatctatcccagaaaaaatctttcacagatagagagatatgtacacattgttcacagcagaattgtttataatagcaaaaaagtaaaaacaatttaagtcattccaggaagaagcagataataaattttagtttattcatataatggaataccatatatcaattaaaattaatgatcactggataattctaaaaataggttgaatgaaaaaatcagattggaaaagaatatgatagtataatagccttaaagttcaatatttgaagtttcttgggtaggctaatgaagattttgcttttgcttctgttttgaaatcaaaacttatctttggatggcctcattagagcatggtgcttatgagtagcttccatccttggatggccagttaagctgtgctgttctctgaccagacgggctgtcactaaaaagcttgtgtttagcttgttggccatttgggaaagtgtagctctttcatttgagaaggtgtaggtagagctgataaaggtttaacttcatcagtaatgttagaaaagtccatatacagtacagtttcttttttaaaattttttttctagaatatagtttcttaacattcatttaataccactgtctgcatctgtaccaggtttaacctgcatttcttatctgtaaatgggaagcatgatatttacctcgtagaggtgttgggaagatgaattgagataataatgcatttaaagcagtaccttttatatggtagatcctctataaacagtagttagaaaaattaacaagtatataggatggcatctatgttaagttcactttcaatggtattgtagtgagaaggtagcattgattacctactcataggtactttaagtaggtactttaattaaattttaggactactgtaattatgaaagtccattattaactataatactttacattttaaaggaaatttacatttataaactcttttcacattaattatctgattttgttctcaggacaactttgtaagatagttatattcaatttagagacattgaatattagtttcaggagaggttaaataagcagtgttagcagaaagcttatgttggttctcatgaaggcagattaaaatggaaataatgataccataatactttgatttttatcatttgtgtttatgtgctttacctacctagattctgaatagatttgtctctgtacttttttcccccttctgtgtgtgtgggaaggggaaggaggaggaggaggaaaagagattatagaagagggttaggtgaatcttaatgggactctttggaaagggagaactgcagcctgcctctcagatccaaaaatgttatattaacgccaccctctcagctccctatattttaaaatagccaagcagattggcaagattttttttttttcagatttgtaaatgttcgatggcaactaagtctatgcatcaaagatttgaggagatttctctaggttgactatggattagaattaaccaccaaatttactagccatgtaggatttgctaagccaatgtgacaaatttatttggtgacttctgtttataaatgcattgattcaattaaattctttctccaagataaaagttatgctttttttttctttttttaaatttcctattttggttgtatgctttaaaagtttgagataggttgggtgtggtggatcacttgaggccaggagttcaagaccagcctggctaacatggcaaaaacctgtctctactaaaaatacaaaaattagctgggtgtgatggtgcatggctgtaatcccagctactcaggaggctgaggcacaaaaatcgcttgaacctgggaggcggaggttgcagtgagctgagattatgccactgtactccagcctgggcgacagagtgagacactgtctcaaaaaaaaaaaaaagtttaagataaacctataaatttgtaactctccagctttgttggttgaaggaaactattggtggctggtattttgggtaatctcacttcttggctaactcccgttaaggatgttttataatgaaaaaaagtaggtacttcacatattaggtttttatcacctcactttcctagtatcataaataaatcgttttttcaccatttgtgtagatttatttcgaggtaggtaaatttcactttgcttgagatcctatgccaacattagattagttttgaaacaggttatatgttataacttctcctatgattctgaaacactttagaaacaaatgattttaaatgtgattttttttatttgttttacatttcagaatctctcttgatttttgaggaaatacctagtaacaaacatgactgagttctggcttatatctgctcctggggagaaaacctgtcagcaaacatgggagaaattgcatgcggcaacttcaaagaacaataatcttgctgtcacttccaagttcaatattcctgacttaaaggtgaagctgcactgtgcaaaattatatatgagttcatcatccaggggagggccagttctctcttttagtggaaatgagatacccaggttccttccaaagaaaacctcctctccagccattggcatgatttaaaatgtgtcttctttgaaattttagaagtaaactaccaaattgaaataatgtctctctacttaggctttttgtgctcttctaaattgcaatgaaaaatcttatgaaaatgtttgatgtgttacattcacaaatatgattttcagaaattaaaactcttagtaatatatattcttaaatatcatagtgaagtttttgttagtaaatttatattatgctgattcttacattgtaaatgtgttaccatggcacctacttaatcacacttggcaaatctaacccagttatttaatccggttaatctatgtaagattcactcttatcaaagatcagtcatctagcagcctcaaagtaaagcaggtgtccagtaatcagttgatggaacatttgtaaagaatggaaaagatcatgatactgacattttgctggttaactgaatgagggagtcgtaggcagcattcatttaagaaatatttaaaatgactgattcttggtggggcatcatggctcacacctgtaaacctagcactttgggaggctgaggtgggcggatcacttgaggtcaggagtttgagaccagcatggccaacatggtgaaacccagtctctactaaaaatacaaaaattagccaggcatgttggtgggcacctgtaatcccagctacttgggaggctgaggcaagagaatcgcttgaatctaggaggtggaggttgcagtgagccaagatcataccactgcactccagcctgggagacagagtgagactccgtctcaaaaatataaataataaatgcaataaaatgaccgatttttaatatttttggagttacggatacctttgagacaagatgtttcctccaaaacgtactcacttatgcacagttttgcatgcaaatttaattacagaccctctagcgcacatccgtggacctcctacttaagagcctgtgttgtaaactaagacttcaaatgatccagtgtcattgaatagtacaagcacagacctgtctttgaggagtcttcaagtcttaagtggtgcttataaccatgaattaaaggattatcttgtacatataaatagctttgaaatgtctggcaaacatcttttaactgtacttacacattatgaaataaaatagggagaatttaagatttgtgagaactttaggtcaagatgaatcatcttgttttttttttttaaaaaagcatgccacctaaataacaatatattttccttttaggttggcacgttggatgtcttggttggcttgtcagatgaactggctaaactggatgcatttgtagaagggtaatgtacttatatgcatggagtagagcaaaatgggagacactattatcaggcttcatggacactgggtttattatcacatgtatactctgcttattggaatggttttagaaaacgacttttttcccttcgtatatcaattttatgaaggtacaatttacataaaatgcacctgtttgaaatatgaaaatgctgattctctttttactatctttaatgggatatagtttacatgccatgcatttcacctatttcaggtgtacaattcagtgattcttagtgtattcagacttgtgtaaccattgccacaatcagttttaaatatttcatcatcctctattcctgttcccattagcagtcacttaccgtccccaccacccacaaattgttctgccactatagatttgcttggtctggacatttcttgtaaatggaatacaatacgtggtcttttgtgactgtcttcttttgcttagcataatgttttgaagtttatcccagcagttgcatgtatcagtatttcatttctttttattactaatattccactatatatgtatacatatatatcacattaatccgttcatcagttgatgggcgtttattttgtttccactttttggcttataagaataatgctgctgtgcatatttgtgtagaagtttgtgttcttaaatgttttcatttttcttgggtatgtacctaagagtggaatttctgggtcatatggtaactctatgctttgctttttgaggaactgacaaactgtttcccagagtggctgtaccgtgtaatattcccgccggcagtgtatgaagattctcatttctctacatccttgccagcacttgttattatttttattatttgtctttttgattatagccatcccagggggtatgagataatatctttgttttttttgttttttttgagacggagtctcgctctgtcgcccaggctggagtgcagtggcatgatctcgtctcactgcaacctccacctcctgggttcaagcaattctcctccctcagcctcctgagtagctgggattacaggcacccaccaccacgcccagctaatttttttttttttttgtatttttagtagagacggggtttcaccatgttggtcaggctgatctcaaacccctgacctcgtgatccacccaccttggcctcccaaagtgctgggattacaggcgtgagccaccgcgcccggctgataatatctcatttttaaaaatttgtgtttccctgttggctgatgtgatgtgatgtgttgagtatcttttcatgtgtttttttgccatttgtttttcttccttggagaaatgtctattcagatcctttgcccatttttaattggctagcctttttattattgaattgtagaagttctttatacagaatatgcaagagataaatcccctatcagatataacttgcaaatattttctcctgttctgtgagttgtcttcattttctttttttcttcttgagacagagtctcgctctgttgcccaggctggaatgcagtggccagatgttggctcactgcagcctccgcctcctgggttcaaatgattctcctgcctcagcctcccgagtagctgagattacaggtccctgccacaatgcgcagctagtttttgtatttttaatagagatggggtttcaccatgttggacaggctggtctcgaactcctgacatgatgcgcgtgcctcagcctcccaaagtgctgggattacaggcgtgagccaccgcgcctggccatgtcttcgttttcttgattgtatctgtgaagcacaaaagttttaaattttgatgaagtccaatttatttttttcttttgttgcttgtgtttttggcatcatatctaagacaccattgtctaatccagggttgtaatgttttatgtctatgttttcttctaagagatttatagttttagctttcacagtgaggtctttgattcattttgagttaagttttatgtatgttgtgaggtaagggtccaacttgattcttttggatgtgaatatctggttgtcccagcaccatttgttgaaaagactgttttttcccctttgaattgtcctggcacccttactgaaaatcaattgaacataaatatgagggtttatttctggactctcagttctgtttcactgatctatgtttctctcctatgccagtaccacattgtcttgattattgtaactttgtagtaagttttaaaatcagaaagtgtgaattctccaactttttttttttttttttcaagattggccattctgggttctttgtctttttgtatgaattttaggatcacagtgtcaaatttctgcaaataagtcagctggaattttgatgaggatagtgttgaatctatgtatcagttggggagtagtatcatcctaatattcttgtctttatccatgaacatcggatgttactccatttatttgaagatggttatgcttttgtcttcaaaattcagttggaagagtttttctaaattgcagtttttattacttttgaaattcaggtacatgtgtatttgagctgaaaatggttataggctctttgataactgcattttgattagttggcagaatcagtctacagttccttcaactctggggatacaaagattttattttagagtttagatacacaggtgtaatttgtaaagtacagaatttggagactctcagaaatgtacatttgattgaagctttaagggaataataggcttggatagaagggaattttttcttgaaatctatccagaagattttctcatttctgctgttaaaatgcttttctgaattgatagaaccacctgaaagcgatgctgtggcaatagagactgaggtcagggttacagagagagagagagatcttttaatataacaccatgtagtgaggaagtaaacagatctaaggatgtattgatgttctttaatattggagtcaagaaggccacttagcagtttcacagtaggttagttaagagatagtaaaagctcagttgggaccagacacttggctcttagaatggaaagagaagatgaaaggaaaagcaacttttaggattataattccatatattcatatagagcaaattattattatgaattattataaatatagtgaaaataattatgatgcactcaaagcactaactgatggaaagaatagtctcttggttccttgcttatacatttttaattaagaaaaaaatgggccgggcatggtggctcacgcctgtaatcccagcactttgggaggccaaggtgggcggatcatgaggtcaggagatcgagaccatcctggctaacacgatgaaaccccgtctctactaaaaatacaaaaaattatccaggtgtggtggcgggcgcctgtagtcccagctactcgggaggctgaggcaggagaatggtgtgaactcgggaggcggagcttgcagtgagctgaggtagcgccactgcactccagcctgggtgacagagcgtgactccgtttcaaaaaaaaaagaaaagaaaaaaatgtgagggaacttttttttttagttgtcatccctggagtgagtcttccctgaggtctcatctacctcattacagttacaagttatgacaaccaaagagacactgagaaaggaggtccctgagaatataattattaacatttatttatacccttattagtcaccttgatggctttatagttctttatctttaaattgttaatgggatgtcctgaatataatttaaagtttgctcagattttaaattttatttatttttttttcagagacagggtcttggtgtcacccaggctagagtgcagtggtgcaatcatagctcattgcatcctggaactcctgggctcaagcagtccttttacctcagtttcctgagtagctaggactataggcttgcaccaccacacccagctaatttttttatttttatttttgtggacatggagtcttgctatgttgcccaggctggtctcaaactcttggcctcaagcgatcctcccacctcagcctcccaaaatgctgagatttcaggcatgagtcactgtgcctagccagctcagattttttagggaaggaatctgaaaagtattaaggacaaatgtagttagtttggtgagtagaatttaaagttacctaggcagtgtgtcagctgttcttttcttcattgttcggcaagcacatcttcttcagtcctcctgaatgataagaggaatttaaaaatcatgtcgttgttagactttggtagtattgacagatgatagcttaatgacttaaatgctccaagtgttaaaggccaaatattgtagaatatggtatatgtggtaaatcatagtttgtactttcttaaaaatgtaatcattagagcagatatttttgaggtgacattgtgtacattgacacagatcctcttgtaaataggcatacggagatcttgaagttctgggttatgcaacattacgtttataaatttgacaccaggtgattctacactctgaagtacttctatgggtaaacatgcaacattttagaatgttcgtagcaaatggttctgtttacaagatgcttgccaaattttatgagaatgatttgtcccttttgaaggaatgggtgaattttggagacataggcaagtatatgtataaacctcaagttaaacatgttgaagatttaggacttacatcattatttctgaaattgttctgatttttaggtttgagaccactcagcataggattgtcatttaaatttagctcttctgtcacctttcctggctcatattggctcttgtttaaactgttaacaagccaggcttgtggctcacacctgtaatccctcctgcttgaggggccaaggcaagaggatcgcttgagcccagatgttcaaagctgcaatgcactgtgattgcaccactgcattccaacatgggcagtagagtgagactctctcttaaaaaaaaaaaaaaaatgcgcgcgcacacacacacacacacacacacacacacacacattttttttttaaggaaaaaaaaccattacaggaatttcttaatttgtcttccagtttcccctcctagctgttgagcatgtagtcatcagaatacttgtcctgagccctgtttcgactgtgttatgtccctgtctagagtgtggcttcagaggctgtgtatctgcaatctggcatcccactttcctagcctaagctcccctacttctcggcctgctgcttccatcagtctggacttctcaccattctctggatgcctactgcttttccacctcttatcatgactcataatatgccccatggcaacgatatgctttcttcccatgtaatcatccttgtaaaaccatttctgtccttcatcgccctactcatgagcctttgggctttcttgattgggtagctgctagtgatccctttttcctttctctctctctgtctgcaacctggcaatctcagctggcactgacctcagattgctttgtatttagtaatttatatatttttggatctttccaatgagattttaagcaatgtgtgaaggtagtgattttgtcttgtatgattttgaatcccacccagggcctagaggcagacatggaataaggaagagaacgctggactccaaagtcaggacaacatgtttctagtcacagctctgccgttaactggtcttgtgactttgaataagccacttattcttttatacctcagtgtcttataaatgaaagaactgacaaggtcatatgtaggtgacttggtttaggttggtgcaaaagtaatggagtttttgccatttttttcccccctaaagtaatggccagaaccacagttacttttgcaccaacctaatagttttggcattatggcttcctctatagcatagctccttgtaaatagtagatgctcaataaacagttaatgaattaataatgtaggacttagtttttcatcatgactattgcttacgttctcttgcctgtcaggtccctttcttcctaagggaaagcacagtgtcttgcatgtcataggaacatagtgaatgctagttctcagcctcctcctttgttctcagtccttaaattgtctagtttcttggcatataaatatatggctatttacagactctttctcactagcttcccatgacttactttctagactaggagacacattgcatgtagtctccttaaaaccctacagttactctgttgatttttgcatgtaacaaagtcttggtccattttatccttaaaacattataaggtaagatccatttattgtgtattatatggataggtataatgggaacatatagtcaaattcatgtctttatgtaatatgttcattgtatagaatggaatttagatctttttcctgagaatggttgttgatattttttcttccccagagtggttaagaaagtagctcaatacatggctgatgtattggaagatagcaaagacaaagttcaagagaatctgttggctaatggaggtaagctaatgctcatgattgatcattattaactcatacaaagcaaataactaagctacagaaacaaaaagtaatgtaaaaaagtctacagaaaaggacactaaatacaatagaaagccattaaaatacaattattattactgaatttggtgatacttccaggtacatcctgttccctgaaacataatctcatagaagacagtcttacataatatgtaatatagcttataatatgatgccaagtctcctgcaagagcagtattgtaaaggtttgtcttagttctttccaggttctatttattcactcatttacaagtaagtttccaagttgtatatctcagcattgttccagttgaatacctgctgtcttatgtaggtttttgtatttaatagtatgtaactgttaaagctttagaacagaaattattaattttattgcagaatagtgccccctcagtatgattttggcatttctttacttaatacccgtaaaatagcctactgacttctctgtagctagaagccagtatttacatagagtttgctctatgtagtaatgactttagaaagatgattctgaccccattgttgtcatttgtacttgcatttcttgttttcttatgaaatgtcattttagcattttgcttcatttaaaatcagcccatctctagtgatacgtttttataacaggaaataatgagctgggcatggtggctcatgcctgtaatcccagcacattgggaggctgtggcaggaggatctcttgagtgcaggagttcaagacaagcctggacaacacagggagaccctgtctctaaaaaacccaaacaaaaataaagaaaaagaaaaaagttacctggaagtagtggcatatgcctgtagtctcagctagtcaggaggctgaggaggggggattgcttgagcccaggagttcaaggctgcagtgagctacgattgtaccactgtactctagtctgggtgacagagcaagaccctgtctcaaaaaaaaaaggaagaaggatataaccctttataaccttttcctttcattctctacaggatcacctactctaataaggttactatattttaaatccagtgttcctgaaatctcatttcttcttgcaaataatagctgctcaataaatttttaatcagttaaaaatgtagtaacttattcttgctctttgttatcaagtaattctgatctcattgtttgctgtgtctgttaatttgtgttttgagaaacaacgaaggtatgttagatattaataagttaatttgtgttgcctttactgatcttctacgtattttatgaactagggcagtcagtctagtaggtggaatggtggttgaccaagaggggcagtgcatctagatagagttgcttttggaaataccatccgtgttgttgactgactggtattatgtaaggagatattgagaagagaaagatatttttatatgaattacttccgtcagttggcgctgccataattaccatttggtttcaccgttcttgatccctttaggggtgaagtcactttgactactaaacttccaaggaataagttgttgagtatttttttagctctacatgttttattctttccatttgaaagtgaaagggtccatgttttgaaaattgttaaaatgtggactcctggaaacaatcatcacatggttttaacagacaagtttattttcagtttgtttgggtaagttatcaaagaaagaacatacttttatgaaattctacttattgaggagataatttgaagtagtttcttaatctttatgtctcctacatatgaggcatattaggaatatgtacatatttcatttttaaagtaatcaaattagaaggagcatcttaatatgtattaaagtttgagtaaggagaagagattacaaggtagaaattttgattaatccatgttacttaatatagttcacatttaatcaggattcttcagaaatgacatctttgctgatttcctcaatgccaatttcagcattaaaatatatcgctgtgtaaaaaactgaacaattctattgtttttcttcagtaattaatttattcccttatttcagtggacttggttacttatataacaaggttccagtgggacatggccaaatatccaatcaagcagtccctgaaaaatatttctgaaataattgccaaggtaagataatacttgagacaagtaggacacattgatttgtagtggctttgcttattttataatttcactatgaaatactttttaggttttgataaggcaacttaattatatttcacagaagaaatccttacaacttagacattaaaagatgttaaaaagtataacactttaatgtgtagattatctaagttgaatacttagttatgtaattaacttaaatattacatcaacagtgtttaagaaagtgtgaaaattctgtatttatacaaattttaagggtacccaagattgtgtagaataggaaattggagtctattaagatttcttagtcattcaggtaggtgatagtagtcactgaagtatgtttatgtgcatacaatacttgttcaaacattaaactctatggattctctgaccccttcggactatttagttttgatcctctgcctggaaaaattcccgtattcgtgtgccacataattttatgtagtttcagggagtacatggaccttgaagccgatgcatgaacccaccaagttaagagctccttttatattgagaaatccttgaacttgaaaggaaatcctagaacttgagaggaaaaaaaagtctttttccccccaagatctgtttgtggaataaaagtcttaacagtaactataatgagacaaatagacaaggacctgttaattgtttgccagcatttgacctggctggggcaagaagtgtagtttaaattattggacagactttccttggctcccagtaactttagttatgcggtgtgctgtatagttaaatgtaaataaatagactatcaaagattttaactaaagtcatcatgtaatttgatgactatagtttaagaaactattatttacattacttgataatataaagtggtgttcttactatgactgagcctttttttctgtatccttaaggatttgatcatctgcttcctgatgctgttgtagataggaaagcaggcttagagaggtgaagtgacttaccctcgtgctacacagctaataatgctagagctatgttaaagtcagttcttcgaatgttgtttacttcacattttctccccatgtagttagtttagtattcttctgagaaaaacagcttttgtaacatttatgaataaattcaactataattttaatttcatagaaaaatactctgtgtaatagtgatgtttgcagtagtcaaaactcttcatgtaatttagtttactttggaaaatatccttcagtcttgtgaattgaagccttgtaaatagtaatctccaaacccagtggcctagattccatttccatggtttaagaagtaatataattaaaatacatgtggactaaaacattatttttagttgaaaagatttatgtggaaattatatttaaaatgaagtcggctgttttttaaatgacctcctaaagtcgtgcttttaaaataatagaatattcttacactagaaactagtgggtttttttgtagaagttaaagtttagctactttgatagtattagtagaggcagatttaggaaaattttatctatttttcttctttttctttttcaaagggagtaactcagattgataatgacctgaaatctcgagcatctgcatacaataacctgaaaggaaatcttcagaatttggaacgaaagaatgcgtaagcagatcaagtatatttgagtactaagaactggggaagcatactagcatgcaccgaaggagatattgttgggatttagttagtttcagtttatgttgttctgtaatcaaaatggtatttcttttacttcatggagaaaagctcactaaggtaagtttatagaattcagactagtccaaacagatgtgaggctgatttattatacttgttttataaataatacttgtgaactgggtcctggcttattcctttatccatttgatatttcactgaaaaatagtctaaaattaattgttttaaatgaaatcatagtttaactgcatagtaattacctatcacttaactatagaataatccttttatgatgtaatagttattctcttatctgttttcagaatttaggtttttcacttgttaggttttttaaaataggactgaatttttttggttgatccccttgtactatgactacttcaagtgcaactttaagcatgaaagtattcaagttgtgccttcatatcctagagggaaagttggttggatactgtgagtgatacaaacagggcaagacatatttattatgggaaagtgattactggaagacaaatgaggactgatttgaaagagttaattattgggttagctaccaaaattgcctagtatcaaatgatacccaagggagggaagaacactaaaggtattgtgcttagatgacatagtttcataattatatgatggaatagactttaattgatatctaatgagtagatagttttccagtcaagatattatatatgtaggcaagagaagagctgagttataataattaaagcaaacacaaaacactagaggcaaattttggtagaagatatttcgttggttgcaagggtaggatatattcagctaaatggtgacttcttacaaagtaaaaatgttgactaagactaatccctctcaatgtatatatagtatatgtgaaaatgattagcctgctgtttctttacttgtgttacagaagcacataattatcagcctaatgatttgttttaattcctcagaggaagtttgctaactagaagtctagcagaaattgtgaagaaggatgactttgttcttgattcagagtatctcgtcacattactggtagtagttcccaagtaagtctttctattataaaaggttttacttgttaaaatacaagaaaaatgttagtatctagtattgtagtttgaagttttccataaaatccaagcgtaaaaggaatataaccttgccattcattctgtcatcaacatttgctcatgtggcacataaagtagaaattagatcataacctggcaatggagacttcagttataaattgagtttccaaatcaaatttagcagcttggtagaattggctcattcaaacataagtaatgctaaattattgattgtttaaaaaatacagattttagatttctcaaaataggaaggtctttgcgtttttttcctgaaaaaatctttatgactggttaggtttaattaagcactgtaagaagcaaagaatggattagatcagagattagcaatttttttctataaagggctagatagtaagtattgtaggctttgtaaacaatgtgatctttgtcacaactactccactgtggcaactttgtggttatagctgaagtagccatagatgatatgtgaacgaatgaatgtggctgtttcaataaaactttatttacaaaacaggcttggctatgggcatagtttgctaacccctggactagataacctttgaaatctccttaggattaggccttctatgttatttaatatttgatcatagttaatcttaaatgaaatgaaacctttgggtacttgtaggaagacctggactttgtgtgtgtctgtgtagcactattaatggtttcacttttgacttacactgagtcttgctatcagggaatgtttgggggatccaaactcaggtgggagatttgggtctttttcagagtatcattgtgtgaagacttccttgctgtgctctgcatttttatctggttcagagatttggagtactagaaaatgatgcctccatggaatttacagtggctacagtagtatctcaattctgcatttttttcccctttattgcagtatgctagaaaaaattttggatttttctttgcacagggagaaggccttaaatctaaggatttcactccagaaattttattttgtgttctagttacataactcccgtctgctacactgaaacactgattatttataacaaattctgtgtatctgtgcttttatactatgtaggaaaataacttttgcccagatgaaatatttgactcactcaacctttatttaaaacttgggttcaaaaccagaaatttttacagttttctgtaccttgtaattgaaacataggacctaggacatcttacatgatgaattattctctattctggcctatacacactataattctttgttttcaatctcaaacgtagttgtctctccccacacccctggaagccagtggcctctagagaaggttgttgcacaatgttttgtggcaacatagtttactgtcacttcatttacttactacctcatggtactctgtgctttccataaatatagttttttttcagtccttcataatggccactgagcaggaatgatagtgattttagcatgaccatttttaaaaaatgaggcacaatacatatgaactatgcagcttgaaaacaatttagaatctatactgtgctttacttcctttccgaacatagttctaggatgtgcctcttttgcaatggttactggaggtagggtggtgatctgtttttcctgcattactcagtgtatttgaaattcattctcagtaggaaacccgaattttttttgttaaatagagttgaagtatacttactatagccagatttcctatttgtctcataattttttctcttcctggatatggcaggaaataggacttgtttttcttttccaatgtgtattgtaccttttctgcaggttaaaccacaacgactggattaagcagtatgaaacactagccgaaatggtagttccaaggtctagcaagtaagtagaagtctttgtaaaaccatttgtttcctagaattccttttagagtttggatgttggcttaggaaatatgtttgctgtcttgcctttgtgataaattaacctcatgagtgagttctatgaactctagttgtaataattttagacctagaagggacttggcacagtctgtttgacaacctcctgtttatagacttagaagtttgaggccagtgaggtattaatagtttgcccaggatcacacatctcatttgtggcagggctagaactagaacctaggtctttggtgtggtactttttctgcctcactgtgctgccttttgaaaattctttattcattattgcatacctactatgtgtctataattcctcattttacttggcaaaggaagtgtaccagaatggctactggactgccgtgttgatctccagatgttcaccatcactttgagcttagattttacctaatttgtgtgttccttttatttaaaaaacaaacctgtttttattaagcactttttaaatttatagatttaacatgcattgtctaatttgaaatttacaacaagtctgtgaagaagtatggacagttatcattcttattctcaaggaagaagaagttaaaatgcttaaatagttgcctgaggcatatggctgtgtaaagtgtccaatggcagagttagggctagaactcacatcttttagctccaggtcctgtacccttttaacactattccatgtcatttttctgtgttctgccattgccacaccagatattctttgagaaaatataaatacagtgtatctccaccccaaaggattcttatagatatatatgtgcttcaaggggaggcagcagggtggaagatataggaggcagtaaagaagtggaattagtaaggtcaggcccatgaaatattttcttttccagtttcattgtgtcatgtgggaagtagcttagtatgatggaaagagtcctggactcagggatctgagttctattgctggttctgtcaccagtagagtctgtcactggtagggtccgtcactggtagggttgtgacttcgagttgtccaggttcttggtgttttgaacaaaaaattggacaaaatgcccagcaaagcaaaataagaatgaagcaacaaaagaacgaaagcagggatttattaaaaatgaaagaaagtacactccacagtgtaggagcagacctgagcagtggctcaagggcctggatacagaatcttcttgggtccaaataactcctacaagtttcccattggccacttcatgctcacctcatgtaaatgacgtggtagcctgcagtgagcctcattggttgcagaaagcagccaaccagaggctgaagtgaagttacaaaggtcacactcctgtgcaaatatctgattggttgcagaaggcaactaatcagaggctagggtgaagttacaaagttatacttctatgcgaatgaagactcggcctcccaatcagtctgatttgttgcagacagccaatttcccatctgccatgcaggaaaggtcaaaaggagtagcctctggtccttttgttacttaggcgtggaaagttagggttttcctttcaatttagttctaggaaaccggggtgaaacaaccttaggttccctgcctccagaccctatttcctgcctcagttctgctaccaacttgctgtgtgacctggggtaagtcttttaacttctctgggcctcattttctttgtctgtaaatggagcatagcaccttccttgtatatattatgaagttattttaagacttaatggagtattcaaaatacaagataatgttactgtattttcacaaatgttgatcttttaggaacttaacaacaaacttgtgctcatcatgaatgttttttttttcatttggaggaatatctttccttcataccagctcttcacatggtaaactgaagactacagttgtgtcttgatattgatggctcacttaggctgttgatactgacagatctttagggcattagagccgtagaggttgactctgtgtctaggaggcaggtagaggaggagagtgaggacgtggtgcacccagaatgtcctccagagatggacatacgccaacccagatgtccagggggatggtctgtaggctcattaagtaagctcagatttactctgatagaaagactttaaaaatattccatcagagatttagatctttggacagtcactttagtagtttaaagggcaaatttcaggaagggaacagtttaatgcagtcaagacttgtttgcaagtgacttgtaagtgcacactaatcttccgagagcttccagcctttccttgctcagtgaaaacatcttttctacctatttctcagttcaaagtacatttggaatcactgactcaaaaacttacctgtttaaatttagtcagagagaacatagcactagctcaaatagcaccatcaagagtatgtgcagttcatgtaggggcaaataggcttttttgagtgagcctggaatattgtctgccatttaggaaagatctctatgacctgatgctgaatttttggcttatcatcacaaccagcatttttgagtaattactgtgagctagtctttgttctatgtgctttacacaagttaattaattataggtagtaacacattactttttggtatgataacttgagtgattattgttgggagcagtgaagatgaaagtggaattttgaggtagattgaaaaatattcactttaatattcaatctaatatttttcaatctattcttctaactgtcctcaaacctgaaagaattttaaagttcacaaaatataactatttataaaatattctacaaagattggacggttttgaaatactaccattgctgtgaggctaaatgcagcaatgtgtataaatgccatgccaaggctgtggccaaagaagtggaggctgtgctgctgttctgcttttttttgttgaaacactgttcagaaagaggtgcttttcacttgtcctttcagaattaccactttcctattttttttttttttgtctgcttttgcttgttaaaatagtctgattgagtcagatcactggttaacttttgccttttctctgtcattggaagcaacatcacaaactcatggatgcttcacagaggtttttctttagggatctggagtccccagtgaagcagaggagcctagctaagaagtgcaggaagaatgatactggccactgtccagaagtttctctatgtttcagagtttctgagggagatggtctgttctcctgtcagtaccacttcaaccacacccatggctctagcctcacctgcagttttcggactgctaaatcttcgtctgtagccagccttccccccaaccacatacctggttcctactggaccactccatgtggtatttcctaggtaactgacactatcaccccaatctcagactcaaactctctagttgccctgtagtatatggcagcaacatctgcccagtgatccaaaccgcaagtgtggtagtcagtgattttggaatcttcctttgcccttgcacccccctccccccaccggccccccacctgaaatagtctaatcagttatgtcatttccaccttccatagtatttggttgaaccgttaaaaattgatgttttgtaggtcagaaaatggtcaaatatctacaatttcatagggttaaatctactctccccactcccccaagacccactgccactgctccagctctgactccctcatcccttgcctggaccatggtaattgaccctagctggtctccttttctcctctcatcagtcctccacattgctgctgttttcatctttgtgacatacaaatgtgttgctttcccgtctaaaaccctgcttgtccctccccattttgactgcctgcccccagcacgcacacacacacacacacacccacacacccacacaccctcttcttgtaccctatgtcccagccatatatgtatatatatattgtttttctttctttctttttttttttttttgagacacagtctctctcacccaggctggagtgcagaggtgtgatcttggctcaccgcaacctctgcctcccgggttcaagtgagtctccttccccagcttcccaagtagctgggattacaggcatgtgccaccacactcagctgatttttgtatttttagtagaggtgaggtttcactatgtcggccagactggtctcgagctcctgacctctaagtgatctgcctaccttggcctcccaaagtgctgggattacaggcatgagctaccatgctgagccccggttatacttatttctggcaattcctcagatgcaccatgttattccacatctatattcatttgcatatggggttctgtctggaacgttcttctcttttttgtctttctttcaaacttccacctggtatcaccactttggtgaaactcctttgaatcccctcagataaagttactaattccccagtgtatcatgtatattttctattgcagcacttacaactctatattgcagttacttgtgtatgcctgtttcctttactaaacccatacctggagatcaggaaatgctgtcttagttttatactaatatctagcaagtgcttgcattacagagtctcagtacatgttaaatgactacaagtctgttatagtaaggactcgtggtttattttttaaacagttttaagaaatacctttccttaggggaaagagggaaagcaagtggcttttatttgtttttcataataaggtggcatagtaggatttagttataagataagatggaggttttatcttggcttttttcaccatcaggattttgagtaagccataggaatttgctgtgtcccagatctctgcacaatagctaggaacctgcttaataggtaacctgttcattgacacagggccatgtcaagcaccaaatgcttttggaagggtcttcaaaacagcaaagtgttggataagtttaaaagattactatgataacagtaaaacattatttgtggccctgaaatagcctgtcaagttagatttggatttgttttgatctcaagcagttcacacatcactgagtaaatcttggcaaagcagaagatccttaaacggttttttaaatcgagctctgtccacttggtagctgcccttcattgggtttgatggacaccaggagcaagaattaagggtaatcattttgagaagatacagtttaacaggaggttctaaatccagagtacttgagttttctctgcatgtcagcgattacagtgatcagtactcctggaggtgtctgctggtcatacactagggaggtgcccctgctggctggctgacgaggagtagggtagattcagtacttaaagccattctgtgattaacactgtaattgcctcctgaatttacttggctaaacaggtggttcttaggcttcaggaaaaactacacttgctttaaacatttttttaatatagtatctttaaattccccagcattcctccattttgtaaaatttcctttttctgatttcagaagtaccacattgtaaaactgaacattaaaaaacaaagaaaacaaccaacaaaagggcacaaggacccttttggtagtgaggggtatgtttattgtctagattgtggtgatggtttcatgggtatatgcgtatgtccacacttcagattatagacattaaatgcgtacagttttctgtataacgattatatctcagtaaagctgtttaaaaaacactaaacattagaagaactccagtatgtgaaagacagaaaggagaagagattcccctcagtaacattcccctgccccaaggttatcgctgtggaacagctgcctgtgcagccttgtggacctcacataaggacttctatacaggaggcactataggtaaattctgaaagccaaatttggaccatactatcacaagcgataccattcacctttcaaacagtggactttcacccaaggtattacagatttaaatgaccattaaaattacctggcagttgtgtctggaaaggtctttctagtgatgtccatggagctgtgactgaatggaagttctgacctcactgggaccttctaaagcctaaaatggagccatgagatgcatacaggcacttttattcagagattatttagacagttgtgttcatcagggtttttttttttttttttttttttttttttgacagggactcactctgtcacccaggctggagtgcagtggtgcaatctcagctcactgtagcctcaacctccccagctccagtgatcctcccacctcagcctcccgagtagctaggactacaggcatgcaccatcacgcctggctagtttttgtattttttgtacagacacagtcttgccatgttgcccaggctggtctcaaagtcctgaactcaagcaatcacccacctcagcctgccaaagtgttgggattacagacataagccactgcacccagcctgtcagtttttgattgagagatgtcatgggagcaaaggaaagatccaaggtttaaggtactggcaatgcagagaggctaggctgggcatcagtggggctgagttggcctggagaaaggaagaaagaattaggcttccagaaaagaagagtgtgcttatcaaggagacactggaaacaaagcagcttggcgctgatgttgattgaaaagtgtggttcttagcgtttggatgctttactggagttaatgtctaattttgttggttagtaagaaataaatgtagagtgttaaggtatcataagcaaaataaatcataaacattcagtatcttcggtgtttgaggcaatccagattgaaaagcattgaggtgatttgggaagggctattataccctacttttctcttccacctgtttctgaattttgcccttaatatgaaagacagcaatacgtataaatctttaaatggactttttttttttccatagtgttctttcagaggaccaagacagttacctgtgtaatgtcaccttgtttaggaaggcagttgatgacttcagacacaaagccagagaaaacaagtaagattattgtttttttgtttatttactttgttagatcagctgtatacaatgtgaacaattttgttttttttcccccaaatttagattcattgttcgtgacttccagtataatgaagaggagatgaaagcagataaagaagaaatgaacaggctttctactgataagaaaaaacaatttgtatgtgtttttaatatttagtattatcagtactaagcagaagaaaaagtggtattgctttcctttgatttaaaagaaagtaaaaatctgctttggttttaagacatttgattttagtttttttttttaattgaataatcagaatgaatttcctctaaagcttaactgttctagagataactattctatttctaagaaagctttcttctaaagcttatgtctatctgagatagaatagagtagatagaatagttatcctaaaatacatacttaaaaagaaattactccacctaaatccatatcagacattaattttaaatgcagtattctggttaacatccttgtaggtgaagggtgattttagttaagtaacgaagttcttttcagtaagacttttcactttcttgaggcagattttttcaatgcctcaatcttttattgaagcaatttgtatttaagctattggagaattggtgtgttctaggtgtaatgggaaacgagtggaattgtgaaaatcaaagatggtgttaactttcttgccatcttcaagtgtgggattactgtgaagactaaaagcttgtttggaaagggaaacataatgagtgaaaatgtgtttctcttaataatgtaagaggaaattaagggaaatattgaaaattatttccaagtactttataagccatatcatctcaactaggaggaaactcattctaaccaagtaatgtcaaaataaccagctttttagggcaaacccaaaatccttttaaaaaatagatattttgacaagattttcacttgttttgctatccttttgcttaaattaattgtttggtacatccaaatgagcctaataatgttatccaaggaagtgttagctgaatcttttaagtatggagagaggaggtatttgaaatccgcttaatcctactaaatatttgaagtttaaaaagaacttaacgctatacaatttagaatgtaaagaggttttagatgtctagaccaactcccttttttacagatgggaaaactaagagctagtgctgttaaatgacttgcctacataactgtttatctttgttactaagaagttgtttgtaagttgaatttcattttacatgtattaaatgttttagagtgttgtgtagtaaattcagatctttatattttgattttccaacctaaggcatttctatattttgtaccattttaactacttttattaaaatatatacctttttctgtgttagtgaattggttcaatgcattttagtgtctgttgagatctctctgtagtggcgaaccttttaatctaatttaagataaggtatctgagataatgagaataatagtgaaacatgtagaaagtgaattatgcgacttaattcttctatagattcctaataggtagtcacttaaaaaaatatttggtctatctaattgctatttctaagaccaaatttgtggtaattttttttctttttatagggaccacttgtacggtggctgaaagtgaattttagtgaagcatttattgcatggattcacgtgaaagcattacgggttttcgttgagtctgttttaaggtaaagcaagttaattgccaaacttggaactgaagagttcatagattccttacattggacctctttattataacacagtccagcaataggaaattgatttggagaaatcaaagggccaatcatgagacagagattatcagtatcatcatacagcttataaaatgcatattagtcttgttctttagcaccaggtttagaaaaagagatttatgctgccataccctcaggttctttttcttgtgtaggtacttaaaagtagattaaatattaaccaatatttgtttaaaaggaagatccttcaggtgttttatatgtcattggatacatagtatgctaatgacttattgaaatcatttcatattaacctaaagtattttaatattttgagatatttaaaaaatcatattctggtccaatgtatgggttgctcatattagaaatagttttaaaaaacccaaaacttggccgggtgcagtggctcacgcctgtaatcccagcactttgggaggctgaggcaggcagatcacgaggtccgattgagaccatcctggctaacagggtgaaatcctgtctctactaaaaatataaaaaaattagccaagtgtggtggcacgcgcctgtagtgctggctacttgggagactgaggcagagaatcacttgaacccaggaggtggaggttgcagtgagccgagattgtgccactgcactattgcaccactgcactccagcctgggcaacagagcgagactccgcctgaaaaaacaaaacacaaaacaaacaaaaaaacaccccaaaacttacatgtaaccatgctcactatttttaaattttttcaaattttcaaactatatgtgggtaacctcatgctattaccataaaagtatctgctgaccttacttcttcttatttcctgaggatattcatatattaccttaaaaattgaatggtaagccaggcgtggtggctcatgcctgtagtcccagcactttgggaggccaaggcgggcagatcatgaggtcaagagattgagaccatgctggccaacatggtgaaaccccgtctctactaaaaatagaaaaatcagctgggcatggtggtatgtgcctgtaatcccagctactcaggaggctgaggcaggagaatggcttgaacccaggaggcggagattgcagtgagccaggattgcaccactgcactccagcctggcaacagtaagaatccgtctcaaaagaaaaaaaaaatgaatggtaattgaagtaattcctagtaattggcgtagagatttctagtggacagtggggaccaaaggtttgcgtttctgtttatattgaagttttttgtgtatattagtttcagtttctatatatattagttgaacttgtaaaggtaaagggagatattctctccccgttaaccatgattaaagagtatgagaatatttgctttgaaaagaaaatctctttacatgtttgcttgtattgcgtactgtatttctgcttttttgtaaggtatggcttgccagtgaacttccaagcaatgctacttcagcccaataagaaaactttgaagaaactgagagaagtattacatgaattgtataaacatctagacagcagtgcagcagctattattgatgtaagtacttattagcccagtagagtaagaattgaagtgaatttcagaaaaaaaatgattgaaagaagatagacagaaaagggagggtaagtatgaaacttaatcattttttattactttgaggttctcaatttgttatgtaaacatagtaatttacattgtttaccctgttttatactaattatatctgtgttttgcttcttggcatttctacaagctagtaattatcttgctgtgtatcagatgtttatagctgcagaaatacagaaaccagtgatactagttatttacaaaaactataaattgcagagaggaagaaaataagcagttattttaattttatttggtagaagcgatagagtcaatagatgagtattttcaaggtaggttcatttttctaaaatggcgtagctgggcgtggtgggacatgttggtagtcccagcaactgaggaggctgaggcgggaggatcacttgagcccaggccttcgagaccaacctgggtaacatagtaagatcccatctgaaaaaagaaaaaaaaaaacagaccaaaaaatgtattatgtgtttatatcttcttttaaacaaaactgttattttttaaacaaaagaagatataaacagagttacttgtgtttttttgttgttgctgtttaaaattgtagtgggccgctgggcgtggtggctcacgcctgtaatcccagcactttgggaggccgaggcggggggatcaccttaagtcaggagtttgagaccggcctggccaacatggtgaaaccccgtctctactagaaatacaataattagctgggcgtggcagcggtcacctataatcccagctactcgggagcctgaggcaggagaatcgcttgaacctcggggggtggttgcagtgagccaagattgcgccactgcactccagcctgggtgacagagggagactccgtcccaaaaaaaaaaaaaaaaaaaattgtagtgggcttttactttatatttctggttttaaatatcttgctgatttttttttttctctttaaaagtttagggtagatggtagcatctcacataggcattaattagaactatgaaaaatcagtttttcttgatagaaggaaatgcgggaaatgacttgctacactttttttctttttctttttttttttttttttttcgagatggagtttcgctcttttgcccaggctggagtgaagtggcgtgatcttggctcactgcagtctctgcctcctgggttcaggcagttctcctgcctcagcctcctgagtagctgggattatgcctggctaatttttgtatttttagtagagctgcggtttcaccatgttggccaggctggtcttgaactcctgacctcaggtgatccgcccacctcggcctcccaaagtgctaagattacaggcgtgagccaccttgcccccggccaacttgctccactttcatgcaattgtggataaaatgagaggtataattatttgatacataaatgttctagcagtaaattcttataacatgcatttataataagtgttatccttgcttgttttttggctctgttgctcaggctagaatgcagtggcatggttttggctcactgcagcctcaacctctatgctcaagtgatcctcccacctcagccttccaagtagttgggactataggcacgcagtaccactgctggttaatgtttttatttttattttttgtagcgatagagtctcactatgttgcccagactggtcttgaactcctgggctcaaggccttggcctctcaaagtgctgatattacagaataagtattacttataaatcatacttgctttatttttactccatattttgtaagtcttgtatcccatcaactcagtattctaagtccaagatttaaaaagttaatttttacagtatacataaaaaaggttggtgggatcatgctaaatacatatgcagtcagaatgcttgaacctggctttaccactcactgtctgtgtttcctaggagaagtcagtctttcagagattgttttctcatttgcaaaatgggaataatgtctaactcagataaattagccttaagtgcatacatttagcccagagtagatgttcaataaaaaggtaaatgttaatacttgctttctttttttgagttctgtaaatacaaaattgaataattgtctgttttttccataggctcctatggatattccaggtttaaacctgagtcaacaagaatactacccctatgtgtactacaagattgattgcaacttgctggaattcaagtgaaaatgggctcctcccccgacaatcctgtccttgtgtttgtgtgtgctaacagaaataagttgcagtatggtcgtacttttaactctagtatcctttgcttgcttcttacgccctttcctaggtgaattctcccacagtggtctgtatctcaacattttctttttaaaggaaaaaatatatatatatagtttctttttattgatcaggtctgtaaatgtgtactaaaaaaatcagagtttatttataaacaaaatagtttatttaaagagaaggtctcttccttattgatatcatggtatgcattaattccatttgttactattgtgcacaaaagccctgttcacaggggaatggtgtaaacatttatactgttttgttcactgtatttagtagacataactgttgaatagttactgaatcatgatgtaaagaatatgtgaccatcttcaggtatgggatttctgaacgtttcaaatttcaatcaatgagcactgtcaacacccacaggagagaataaaattacctgtgcaaaggtgtattgtggtgtgtgtaacttaagattacagttctgtttgagagttaaatgatgtcatagctcacttgctatgctgcttccaggattttgttatatgctgaggtgtaaccatttgtgttgtctgactttcgtatgatttaattgagccaaatttgggtcagaacacaaatttgaagatgacttttcagtatatgatgggtatttacatttgaacactagaattttaggtctctcaaataattaagaatagagccagttttgaataaagtctagcagaactatgcagctttagtcatttgttttgtctaagtctgtattttatgtgttgtcttcttaagatctataattttggcatttatgtcatttgtgacatagtctgaaaatagagacattgttggcctttaaaatctcagaaatgaatgacttaatttagtgtcctgaaagagcttttaaaagaggattttgtggcaatgtttctcttactacgtactcacaggtttgcaaatgggaaaaaagtttacatttcagtttaggggcatatctaagctatgctattccctttagaaaattagcctccaaaatcttttgtttcaaaatattatattatttcataaataatttcaagcaaatacagacatccacaatgtagaacatgagagaccccctccctcaatttccacctcccaagggaagtttatgtatttttctaggcccttttctatgtctttacatctctgtctcacacacacacacgtatacacacacacagtttatttttaataaaataggattataccacacacatcctgtcacttgcttttttgcttaagagtatatctaagagaatcctttgtgtcagtgaagctggagctacctcattcttttaactggctgcgtggcgttccattgagtgtctgtcatcatgtgtttagccgagtggatggatagtctgcttgtttttagtttttgctcttaacaaacactgctgcagtcagcatccttgcacagatttctttgtatacttgtattagtatttctgtaagatctgagaagtggaatttgtagggtcataggttatgtacacttaagtttttgacactcactgccaagtcatctgtcagaattctaaactaaagacatgtttggagtgtggatttatcttcagtttttctttggacaagaggaagctgtgaaagattttgctatcagaaaattttggttctttgtcttttgcacatgttctttgagtcttagtatctgtaacgtggcgctactctctctatcatgggggggcatgttttgacattaaattgacttttaagaaaaacatgtcactaacctgaagctcagccacacagtgacttttaaggttttatttagactttactgttgttctcatgagagtaggtacagactgcataaggtttagaatcccagcatatgtctgaaacgacgggactttcactgtgatttccaccagagaaattatagcagagtggctgagcatgtgctctgaggccaggccccagctctgctgctgacgagctgtgtggtcctgggcagagtggtctccgagttccagtccctcctctgtaaaatgggcatgattagagtgcccaccgcattagggatgttggggtgagtcagtgtgaccccacgtgcacagaaagtgctgcgagtggtgcatggtgagaggttgatgcaggtacttagcccttggggaacacaggtagttccttttcactgtgtttaatttgggaaaatccagatccacatcattgtagagtctgagggttagaaggaagtcattgtgtctaacataacaacagagcagtttgtgtcactgagctccagtctgtgctggattattgatattgttggtggcggtcaccattcctggaaagggactgtcccaagccacttaccttcccgaggagtctgctggttctccttgaggatagtgcttagataacagactcattaaacatttactgagtgtctgtcagggatcattcacatccacatcatcctcccggcccctccccgtgttgttcatggagggagtactggcggtccccattttcatgtatggagacttcaggtgaaagaagttaagtgaattctttgttgagtcacaaatcttgagccagtcagaatttgaacctaagatttttgactgctggttgtcacacttcccgccccacactcaactgttgtgtgaatgagccagacacattgcttaacctgagtccgagatggacaatggtataggaaagatattcggtatggagaatcagatgttaacttgtgttgctatttttgttttgttttgttttgttttgtttttgagacaaggtcttgctctgtcacccaggctagagtgcagtggcatgatcagggcttactgcagcctcaccctcgatttcctgggctcaagcaatcctcccacctcagcccccaagtagctgggcctacaggtgcgtgctaccacgcctggccaattttttaaattttagcacagatgaggtctcactatgttgcccgggctggtctcgaactcctgagctcaagggatcctcccgcctcagcctcccaaagtgctggtgttacaggcataagccaccacgcctggcctgtgttgctattatatttggcaggaacccagagtccagaacatttcatctatgatgggttagataatgtgtctagttgtttgcatgccaatttcagtagcctcagttattcaacctaggagatttttctacctctttactaccctgctgaagttgctcttcagcagaaaatctttgtggaacacattccacactttgaaatcttcgtggaacaaaagatatttgtggaaccaatctttgtggaacatattccagctttttgaatgagtgcatatccagtagtacctttaaagtaacactttgtacataacaaatactcagcaaatgtgaaactttatttgctcttacttcaaaattagtccaaaatgttggaaataaaatataagacattgatctagatatgaggtttttctccttcattctcagctgtcgaagaaatcaaagtagcatatgcacaaggttaaaaaccacatatacaaatactatagaacagcttataatgaaaaccttgcctgcctttataaaaaatgtgattatcttcttctgttaatgtcaataaaagatggtttgtcctagaaggtctataaatggtattatgttctggaggaaacctagcaaaaactttgctagtttagtacttgtctctaaattgatgttcacccatttcaatattgcacttattaatggtctttatttttctagcatagataacaattgattctttagattcatatatggaggtaattcttgctttctaaagaaaggaatatggcacattggaaccattttattcaccagtggatttacccttagagtatttttagatctgagctgatgacttgtgagagaaaaagggaacagagtaaagccatggaagccatgaacagtaagagactgccgcctggcatggtttcttcttctgcagaagatgaaactgaggagaaacaagacaacatccttcataccaggaatggtcaagataatgcaagaagaaaaaagctttcaaacaaatcagaaggcagtcaacaaacagaaagggggacattccttccctggcagttactcaaaactgaaattgcttattgtgtacaccggggcttgtacttggggaatttaataaaaatgctcattaccaagctccagagagatgtggtttaaagtcttaagtagatccaaggaataacctacattttaaacaaatacccaggagaatcagaggctaggggttagttgtaatcggatactaccttttaatgattcttcctctgaaccctcagattggggtgttgatttagaatttgtaagcatcttgaggtctcattcaaatagtgattcttctctattgacagagaccacacttaatagaatcatcatgggtaaatcagctttttctactgtcacttgaagaaatattccacgtcgttaaatcagtagaactggagagttctgtctcagcagaaattgatcaataaagatgtcttttgcccttggaaggccatagaatatcaagttgaaatttgcaaaaactctaaaatgatcaaggtcacattttcatcttttaattgagaactcattgtggacataatttgtcactgcttgtaaagtgtaaaaagaaacaaccaaaacagactttgaaagaatggtttatatgaggaagccctcctcccccccagaaaagggctattaagatgaaagtgaaagaaggagttggaggcagcaaaggttattgttgatgttggacaaaggaaggaataaactgtatgacaccaccttgaacttgaaagtcatttgttttttaaccagaagatgaacaggaactatttagaatatcaaatcccaagagcagctttcatgtattttgctgtttcctaggtatgtgggtggcctcaccgcatagtcctgtgacaaatcttaattatttttttcaccaacacaacttgccatattttatataaactacttagatacatatttagactgtttctcaagagtgctttatagttgagtacaggttttatgcattgttagaagcataaagacgcttgttttttaaatagaaattgtgattatgcagataccatgttttaccacaagagggcactctggtgccattgaaaagcaaacaggtagtttctcctccctgcatttttggttctgacttgtacagtcagtttagagaaacctacactctgcattctggtttggtatattttgttacaagcgtttattaatataaagttctcaaaaaatgttagatgacttattttgtgacactctagcctctgtgtgtgtgtgtgcataaaacccacacatctttgagcagaccagtgccagccagtgacagttttcactgaagatcaaattaaaaaggtaaggatatatgtatgtgtgtgcatgtgcgtgtgcatatataatcactgactcagttgctgagcatgcgctatgaaccaggcgtgttaggcgctggggatttaatgcaagcagtcagatgggcacagtgcctacctaccttgatggggcgtgcagcctggtgatctggtggcaatcttactggacaaaacacaaacccggcagccctaagttaggaaaaggattttactgatctgtgaaacccacagtctgaaaacaaactgatttaagggtatctgtccagaaaagtcaacctatgttatcagtcagtgggtaaagaatagacacatcattttatcacgtttgaccacctagtcggcctggcttagcagtgtccaaaagaatttcttatgatgatggacattctatacctgtgctacccaatgtggtgcccctagtcacatgtgactgaagatcacttgaaatgtggctagtgtgactgaggaactgaatttttttatctaatttttttttgagacaaggtctggcattgtcgcccaggctgccttctgggctcaagccatcctcccttctcagcctcccaagtaactgggaccacaggcacatgccaccacatccggctatttttttttcccggtagagactgctcaccatgttgtttaggctgatctcaagttcctgagctcaagcaattggcctgacttggcctcccaaagtgctgggattacaggtgaaagccactgcacctgaccaatcttatttaactaattaaatagctacatgtggctggtggctactgcgctggacatagaggtctagttggtcacacctggctaatgagcctttttgaccttgagtttccaatatatcccatatcctttggctttttttgtttgtttttttatgactggaagagccagccttgcttctgtttactttgattgctagatttaacatccccacaagcctgagaaaaagagaggaaaggattgctcttggaatcattgttggtgtgcctcagattgctacgcaggacagcattctctttgatcacaaaagacaactacatatactttgtgcattgatgtgcacgagagtaaactggttgtcatactgaaagaccagaagctgtttctgatgggaaatattgaatcagcagaattgaaaacacagctgtgtggttctaatgggaatataatttcttctgtcaatcagtgctcacttagtatccattgtgtgcagagcattcactattccagcctctgcagggagacatcagggagatgctcaccacgtgcttttgaatgatattatttgtctttattgactctaagaaatgtaagaggttcataaaacattgaagccattaaggccttatttgagaagtctagcaactcacagttgcccttggaaagaggcaaataggaaggggagagccctctgtcagacttgttttccatcggtgacatgtggcatggattttacctcctaccgttagctggccaccctctgcattcaggcttgtgaagcattctggaggcccccccgccccatcctccactcccggctcttcctttggcatccccactggccatatttctttcctagtctgttctgacagcctcctaactggccacttgtccccagtctctggtcaccttcagctcaccccagttctgggaccagaggactggcaagtcacttctcacaaattccgaattgctgctcacttgccctcgggatagaggctctattcaaactggactttcttcccttttagaattggcttctctatgtgttctctgaaagaagaatatcgtttactgttgttgatttgatgggggccgctttggaggaggaatttagaccatagatggttcctagggatgctccagcagtctcctctcctttcctacctcctccaagcaggccacatgagccaacttcacatctgtgctctctcaggatgtaaaatcgtgggcagactagcatcccagggtctgaatcattccttcctctgtagaagaaggataatgaggataacactacaggactattgtgagaatgaggattaaaccgcaggtccaaattttctagcatggtacatggtgcagaggaggggctcaacatattaactgctgttgttattgtgtactacccttttccatgctgcatgatttgtgtttcttttttgcctactgcctcatatcttatgtgagatgaaattagttcctctttaactgcatctgtttagaaggcagatttcccattaaaaacctgctggcatcacatgaccagcaagttcacaccaacgtgtaaacccaagaaaactgaaaccatatattcacacaaaaacctgtacatgaaagttgataactgcattattcataatagctaaaattggaaacaacccaagtgtgcatcaactgatgaatgaatggatgaacaaaatccggtttatccacacagtggaatattagccataaaaagaaatggaagtactgacccacgccacaacatggatgaacctagaagacatcgtgccaagtgcaagaagccagacacaaaaggtcacagatgacttcatttatgggaaatgtcatgcatagtcaaataaatcggtatagaaagaagattcgtggttgccaggaaccaggatgggaagggatttagtagtggctgctaatgggtacagggtttctttaggggcaatcacgttctggagttaagatagtgctgatgatcacgcaactttatgaatatattaaaaatcaccgaattgtatactttagaaggtgaattttgtggtatatgaattgtttctcaatttaaaaaacctaccgggaattagctcagattttctacaaattctcttaattctttgcttatctgtttatatcgatagaatttttaaaaattaatttgaatttccttttacgaatggtaaggagatttgccctttggggtttcactccgtccagtgctcttgctgtcgattctgtctgtttgccttttttgttgttttcgtttgtccactcagcatctcagttggccttagctgcagccgtctgcagccgcctcctccacttgggggttaggttgcacatctgtcccagagtagctcatctcactggttatcacattagcagtcactcatgtcagcagtccccgaagaaaagatagctggttggctggggataaagcatctgaaactttgctggtctgatgatatctttctgttgtttcagtacatgtgtcactgacaacttgcttaggtaaaagtgcccatagttccttcatttgttcaacaaccatttactgagggcagaatcctcattcacttagtgaatacttagtaattgttgaatacctgggtactagggcaggagcagccaaatgagaaaaaggactctgtccacatggagcctacctgctggtggacgatacacaataaacatagcgaacaaggtaagacttttcgccctctgcacctgtaaggccattgaggactaacctggctgggaatgggtaggaagagctgcttcagaggggtgtctagatataccccagaggatgccagccatgtgaagacctaggggaaggaagtgtctcatagaggttgggtaatagaggatcagcgtggcaatagctgagtgagtgagtgaagggtgtggtatgtgcagcagatgcacctaggtggggtcttcagaacatggtgaagaactcagacttttttcttctagcaaagggaacccattttagggactcatgtgcatgtttcaaggatcactgcagcagtggtcatacttgtgtgtttgtagcccctatttcttacgtcgtgcttggcgcattcatagcaggcactgggttctggttcagaactgaagtggatgaatgcatggagaatgtactaaacccggaagtgtgccagactctgcacccgaaagttctctgcagcttctccaactttaagagtgttctgcaaacacactgaatgctttgcctggatcttcctgtgaagatccaggcagaatttagtaatagaaatttgtaaaatttattcttaaattcttttgcaactgtcttgatttcttcacaaacatagtcatcatctgtttatcaaatgggcattttaaataatatttgacacataactggctgactccacagctccaaattagtcacacggtagtcttttgataatagccaacatgtgacaacagggattttttgcacgaggtggggagcattctggtttccttttcatttttccaatatgtcatatttctcacttccacttttcttagaggggagggttgtctttttgcttcaaactattataggcttttactgagagacaagaggctatgagccccactcagtagaagaagggtttaagtctatcatataaattattgccgctctaacttctctctgtccctgcctcttaagtcatttacggtatttgtttgggtagctatattggatttcttccgtttttccaggggaaatacagcaactttggagagacgtgaacatgggaatatatgaattgattgcttgagaagtgttagtgttagttctggaatgaagtcctgtgtcattaggtgcttacgttgaaaggaaatgtagaattttccatagtcgcagctttccagattttaattggctgcttgccctcgtgtcactttcttttctaaaataaatgttttggatggctcttatctttacaaccaggcacacagcttcatttcctcctaactaggaaagttaactcttcagctacatggtggtacacaatgttgtccctgctcagcagcccttgaacactcattaaatcccacattagagctgcaaggagatagtaacatttattaggtgcctcattttttttttttttctctgagagcggatctcgctctgttgcccaggctatagtgcagtggtaccatcagggctcactacagcctcaacctcccaggcccaagtggtcctcctgcctcagcctcctgagtaggtgggaccacaggcacactcagatattttaaaaaatttttgtagagactatgttgcccgggctgccattgtttatccattgattttttattttatttacttatttttcttttgtcttttttgttgcctagtttcccccctgttctttgcttcttaattttggttggtcaaaatctttcttttaacattttgtttcctcttcaaccttgggaattcttctgtttctattctttcttgccttttccttgcttcatttcaggactcctttccaatgaacctgccattttttcctgcaaagattgtagtttaaaagaaagcccactggcctgaaactttatgtagctaagcagctatttcaaattctttctgaggttgagggcaataaatgataaaatcacgcagtcaggcagtgtgttagttctctaaagacaagagttcagagttctgagttctccaaagacaagaactagtatatgaagaggtttattataagaaactggctcacatgattacagaggctggcaactccaaaatctgctgagtagatgtcctggtttgagtctgaaagctggaagctgctgtagaacccagaagagctgatgtcccagtgcaaaggcatcaggcaggagagttcagtcttaccagggtcagtcttttattctattcagcccttcaactgattgggtgaggcccacccacattatgtctgctttactcaagacaactactaatttaaatgttaatttcatgtaaaacactgatatggctgggctgtgaccccacccaaatctcatcttgaattgtagcttccataattccttcgtgctgtgggagggactcagtgggagataattgaatcatggaggtggtttccaccatactgttctcatggtagtgaataagtctcacaaggtctgatggctttataaggggaaacccctttcacttggctctcattcttcttgtctgctgccatatgagatgtacctttcaccctccaccatgattgtgaggcctctccagccacatggaactgtgagttcattaaatctctttcttttgtaaattgcttagtcttgggtatgtctttatcagcagcctgaaaacggactaacacaccctcacaaaaacacccagaataatgtttgactgaccatctgggcaccttgaggccctgtcaacttgatgcataaaatgaacatctcaggcagctcttgctttctcagttacaacaggccccgatcctggcctttgggttatttgttgtttgatatatacagaaattaaacccaaatttaaaaaaaaagggactgaaatctcaattcctaaccatggcattatttttacatttataccattctgatgcctgtttaccacattttgtgtgcattctttttactggtctctggtcatctgtctcccattcttcacaagaattgttccaaatcttctccccttttcacagggtccctttccaaaactccagctcttttgtgctttgcttaagatctggcctcttcccagataggagaggttgtttaccttgctaaggtcacacagctactgtatggtaagactgggatttaatttgaagcagttggtcttggtagtcatgggagcccactgggtgctgggtgctgggcactgtgccacgtgctaaatgccccagacttccccatgctgggtcctcctcgtgctgggagggtgtgtactcttccagccagcatgccctgccccttctgcatgccacactctgctctgatcttcagcccagcacccgtccctctgcacacaggcctttggcgctttgtttgctcctatgattttctgctattttctgtttaattctctcctttttatttgcattatataaacagttctgtttctttcattaagaaaacacctctcacaggcacagtggctcacatctataatcttagcactttgggaggctgaggtgggaggattgcttgagcccaggagttcaagaccagtctgagtaacatagtgagaccccatctctattaaaaaaaaaaattagccaggcgtagtggtgcacacctgtagtctcagctactcaagaggctgagacaggaggatggtttgagcccaggaggttgaggctgcagtgagccaggatcacatcactgcactccagcctgggtgacagaaccagaccctgtctcaaaaaaaaaaaaaaagacagcccttttctctgacccctatgtccctctcatttgaggaactatctatcttttcattttcctccacattctttattctttttaacctccaaagaggccctccacctgcattacgtgccttgccccattaataatgtactagtgctatgtatgcttgattttacataaatgttttattgtgcattaaggtccattccccatgcatatgcgcacataaattgcactaattagagtgcacagcatgttatattgcaagattacataaaatagattcaacacttggatattgtccagtacattaattcctttcttttacataggacataatatcattgattgtgcatggcacattaagtcacatcaagtcacatcaatccttaacaacatgcttatcacttccaataggatttctttaccaccaagctttgagaaaccagcaacctactcaggaaatgtccttcttgctttgggcccataaaacctaggggcttctagacttgaaactatacctagcatctggttcttacttcagggccatagatttgaaaccactcatttgttccccctaaataagacatctcagtgactaatgactaactagcacaagatgacatggaactgtggggtcatgcatttggtattttttaattttggagggtgctgtgatccaacatggctgtcaatgccttgacacagtcagctagatcgtagctgcgcttaaatggaatattctttactcacataaaatcatttggtgctaattgattcatctcaatggacgtaataaaaacaagatatagacacagacacatacaagcagttcttcctgccatgtatgattaactttgtaaacccctctaccctccttaagctcttatagtatctgagtaagtcttttattcttgccaaccctgcccaaataagaaaccttgtatctattgactgctaactaaggctcctatatatactcacatgctattaaatttagttataagttcatctagcattaacccaactcctaattaaagcatttttcaaaaatccaaacatcaattaaaaattaggctttctaggctaaaagtttttttcttactaagattaccaaaagagcccccaatgctaacatagcacataatttagcagtttttttccccaggacagaattttctagatataagtcgatgtagctcagtccactaaagtaaggcactgaaaatgcctagatgagttcatgtaactgcataaacacacaggtttggttctggcccttctattaattcttagtaagattacatgtgcaagtatctgcattgcatgtgtaatcagcaaaagagcaaaaggagcaggcgtcaagcacactaattggtagcaactaacgtcttgctcagccacactcctacaggaaatagcaataataaaaagcaataaacaaaaagtttgactaaactatgctaattttccttagggtcagtaaattttgtgtcagccaccacagtcataaacccaaattaataaaatctgaaaagcacgtttgtgtttaggataatacaaataaactacaaaaatgactttaatatgatctgaatacacaatagctaagacctaaactgggattaaataccccactatgtttagccataaacttaaagttattcactagagtactatcagcaacagcttaaaactcaaaggacttggtggtatggtgtttccatcccccctagaggagcctggttcataattaataagcaatgataaacctcactatttcttgtcaattcagcctgtatactaccatcttcagcaagccctaaaaaggtcataaagtaagcacaagtacttacatggaaacattaggtcaacatgtagcttatgagatggaaagaaatgacttacattgtctgattaaagtacacccaacccatgataagccttatgaaactacaggccaaaggaggatttagtagtaaattaagaatagagagcttaattgaataaggttgtgaagcacacatagaccgcccattaccttcctcaaatgcttcaataaactcaagtttataattaacacagacccatctataagaggagatgtcagaacaaagaatactggaaggtgtgcttggacaaaccaaagtgtagtttaactcaaggcacctggcttatgcctggaagatttcatattaatctgaccactttgaactaaaactaacaaaatttaacaactacatacacattttaaccaaaacattatttacaacagggaggataggagatgatagaaatttatttagatgctatagaaaaagtactgtaagggaaagatgaaagaataaactgaaaaaaaaaaaaaaaacaaagcttaccccttatgccttttgcataatgaattaactagaacaattttacaaagaaaactttagctaaaaaccccaaaaccagatgagctactcatggacagttacaagaacaaacttgttcatgtggtgaaattgtgagaatatccttgagtagaggtaaaatgccagtcgagctgggtgagcgctgaatttcaattcaaccttaaatttacctaaagaaatatttaaccttaatgtaaatttaaacgttaatctaaagagggacaacactttagaaacaggaaacaaccttttatagaatgtaaactattaaattctcataattggcctaaaagcagccaccaattaagaaagggttcaagctcaacaatcaatatcttaattccaactatttatataaactcctaatattttactggactaacctatgtataaatagaggtgattctgtttatataagtaacaagaaaaaatgtatcgttgcataagcttatattggatacaatagcattcctaatgttagctgatagttaccaactcaataaattaaaccgatcaattgactgtttatccaaacaaatattgcagggttcagtggctcacacctataattccaatgttttaggagtccaaggtgggaggattgtttgaggccaggagttccagaccccatctttacaaaaaataagccaaatagccaggtgtggtggcatgtgcctgtagtcttcactacttgggaaactgaggtaggaggatcccttgggcccagagttggaggttgcagtgagccatgatcatgccacttgcactccattctgggtgacagagtgggaccttttctctaaaaaacaaaaaagaccaattgttaatcctacacaggcatccactactgcactacttaaggaaagattaaagaaactaaaaggagctcagcaaatacaaaccctgcctatttaccaaaaacattacctctcatataactagtatcagactagtatgtcacctgccttgtgacacatgtttaacagctgcagtattgtgaccagtgcaaaggtagcataatcatttgttccctaaatagggacttgtatgaatgaccacaagagggttcaagtttctcttacttccaattagtgaaattgaccttcctgcccctgcggaaaggcagggatattaaaataaaacaagaagaccctatggaacgtaaatgaattagtctacataacacaactttaacctaactattcaaaggaataacacctaatctaccagactaaaaattttggttgaggtgacttcagagtacaacacaacatccaaatgattaaaatctagactagaccagtcaaagtaacataatcgcttattaacctaagcaatttaatcaatggaacaaattaccctagggataacaacacaaccctattttagagtttgttatcaacaacagggtttgcaacctcaatgttggatcaggacattccaaaggtgtaactactattaatgaatggttcgtttgttcaataattaaagtcctatgtggtctgagttcagaccggagcaatccagatctatttctacctattcagtatttctcttagtacaaaagaataagagaaatagagcccatttcaaaaaacttcctcaattttaataggttatatataatctcaacctaatatactattaaatgtcctgccaagaacaagggcttattaagatggcagagcccagttattgcataaaacttaaaactttacaatcagctcaactccttcttaacagcatgtttatagttaatcttctacctattagcccccctctccttgcaatagcattgctaacagctgaataaaaagtattagattatatacagtttcataaaggacctaatactgtaggcccctatggcccacttcacttcttcactaatgccataaaactattcactaaagaaccattacgaccaccaacatcttctatactatcatatgccattgcacccacactggccctggcccttgcacttactatgtgaattctactaatcttactgtacccactaattaacatgaatataggaacactattcattttaaccacatgaagcctacccatatattccatccttcaatcaggatgaacatcagttttaaaatgtgtgttaattggtgcactatgagcagtagcacaaacaaatttatatgaagttatcccagccaccattattagttctctcaataagcaaatcatttacattaacaactttaattgatacctgagaatatgtacgactatttttttcatcatgatccttagccataatatgatttacttcaacagtagcaaaaactaatggagcctcattcaacttgacacaaggtgttgaaacttgtgtcaggctttaacatccaatatgctgcaggccaatttgtcctattttttttatatagcagagtacaccaacatcattataataaatgccctaaccattatccattgcctagaagaactccatgatattcacataccagaaatttatatactcaacttcatcatgaacaccattttcctatcttacagttcttgactttgagcattatacccatgattccagtatgatgaactcatgtaccttctatgaaaaaatttctaaccactcaaattagccttatgcatatgacacatctcagtacctattttactactgcatattccaccacacacataagaaatttgtctgataaaatagttaaagagagtaaatgatagagatttaagtcctcttatttccagaatgttacgaattgaacctactctaaagaattcaaaaatcagctgggcatggtggctcccacctgcaatctcagcactttgggaggccaaggcgggtggatcacctgaagtcaggagttcgagaccagcctggccaacatggtgaaaccccgtctctaccaacaatacaaaaattagctgggtgtggtggcacatgcctataatcccagctactctggaggctaagataggagaatcgcttgaacctgggaggcaaaggttgcagtaggccgagatctggccactgcactccagcctgggagacagagagagactccatctcaaaaaaaacaaaaaacattcaaaaatctctgtgctgcctaatataccatattctatagtaaggtcagctaaataagctaccaggcccatatccccaaaaacattggtttatattctttccatactaattaatcccctattttttctaccattctatttactgtcttcataggaaaacaatcacaatatttagctcacattgactaataatctaaatgggattagaaataaatgtattagccatgattcccattttaatgaaaaaagcaaatccatgatccacagaagcagctaccaaatatttcttaacacaagcaaccatatttatacccctaatgatagacagcatcattaacatattgtattctgggcaattaacagtcataaaaattcccaaacaaacagcatccccggtagttaccatagatagcactaatgataaaacttggactctccccattccatttctgagtcccagaagtaacacaaagaatttcactaatatcgagcataatcctattaacatgacaaaaactgggaccaagttcaattatattttcagtatcatatcatcgattaatccatcaattaatctaaatataatacaaataattgccatattatctattctaataagacgatgaggagaatttaatcaaacgcaaccatgaaaactcttagcctatttattcaccagttgcacatataggctgaataataactatccttatttataatcccccacaataatcataaaccttctaagttatatcattccaatgattaccatattcataatatttagttaaaacataaataccacaacactatcactattgcacacatgaaatgaactaccaataataacttctataatccttataactattattcttaggaggcctacccctacttacaggatttctacccaagtaaattaacattcaaaaatgttattatgccaacattcataattattttctttttttcttgccccccattcgtaactattatagtatttctcaacttatatttttatgtatgactattctttattattaactatattttcaacaaccaataacaaaaacaaaatgacaattgaaaaatataaaatggcttgggtaacatagtgagacttcatctctactaaaaattaaaaaaaaaaaagtagctgggcatggtggcatgcacctgtaatcccagctacaaggagactgaggcgggaggatcacttgatcctgggagatcaaggctgcagtgagctgtgatcatgccactgcactccagcctgggtgacagagggagaccctgtctcaataaaaaaattaaaatatatatgtataaaacaaatattctttctcccatcacttgttttactatcagctcttttcctcccactttcaccaatatttccaacatcaaactagcgatttaggttagatagactaagagacttcaaagctctaagcaagtaccctatacttaattcttgaaacataaggattccaagactcttacatcaattgaatgaaaaaaaaaaactttaattaagtgaaatccgtactagattggtgagctccaacgtcacaaaaacttagttaacagctaaagcattctaatcagttagcttccatctacttctcccgctgtcgagagaaaaaaggcagaagaagcccgggcagaattgaagctgctcctttgaattggcaattcagtgtgaacattcacctcaagacagggtcgaaagagggttcaacctctgtctttaaatttacaatccaatgcttattcagctactttatcctctacctgtgctcgttaacccttcatcagtctcaacaaacaacacaggatagtgacactataattttctacgtggtgtttgagccagaatagtagggactgccctaaatcttgtaatctgagcagagttaggtcaaccaggagtcctattcagtgacaatcaaatttatttatttatttatttatttatttatttatttatttatttatagacagagcctcgctctgttgcccaggctggagtgcagtagtgcaatctcagctcactgcaacctccgccccctgggctcaagcgattctcctgcctcagccttctgagtaggtgggactacaggtgtgcgccaccaccacatctggctaatttttgtagttttagttgagacagggttttgccgtgttgggtaggctggtcttgaactcctgacctcagatgatccacccgccttggcctcacaaagtgctgggattataggtgtgagccaccgcacctggccaagtgacaatcaaatttataatgtcatcagcactatatctttatggcatacctattccaattaggctttcaatatgtaatatcacctatgatagaagaacttctacacttccatgattacactttaatcagttcttgtgtccataataatcgttttaatagttatgcctattttagtgagaggacttggcaactgattagtccccttattaatcagagaccctgatgtagcatctccctgaataaataacatatgattctgacttctcccaccatcatttcta

SEQ ID NO: 5670 - DNA, 74326 bp, Homo sapiens
  C9orf91 gene - 114453194 - 114487519 of chr9; NCBI Entrez Gene ID: 203197; Build 35; sequence includes 20,000 bases upstream of initiation codon and 20,000 bases downstream of termination codon of the gene
tactgcataatgttcaggccatgagtgttatttatagattgttggtttcgaaagtatctttagctttgaaatacagcccattatagctgatgggaagatagcatgtgaaggattggggtacaggtggccgaagcagacagtagtaggccagaaataatactggagtgaatgtggacttgcagaaatagttcttggagttttgagagagagacctgttaattgtttcagactagcatcagggaatgttgatgtcatggggtcatttcattacaggtccaaagttctgttctgaatcaggatgtggaaggttaagttcattttcactcattcgcgtggactctagacagttggtatacaatgatgtacagtgttgtataacaaagcttaattttagatgcaggatgtcttttgctctcaaataaataggttgatggtctagaacctctctttttttttttttattggtgagcggagactcaaagcagagattatatgttggctgtccttgtggtctgttttcatgtagactctgaccaaacctagagattttttccagctgtatgttaagccactcacttctagaaaccaaaatacctgtgtctcctcttctctcagccacttgtgcagtcttactgtccagtactcctcattcagcattccttctcagtcaccactgtccttacttccttgtgacagggactgcttttagtttccagtgttacattatatagttggttcattagttacattatatgttgctgtcccttgcgagcttattagccttcttgctaagcatctgagtagggttgcacctttaatcagcagcatacttaaggtgtttacttctggagaagagttccctagatggttaatgttactcattttatgttggttcttaatagttgagattgagagaatattctgacacattctacaatttttttccatctttttaatgggctgtagttacagaaggtattcatttttgtcttgtcacttcctagttaagtacagcctataggagggaggaacctgtactgtttgttagctctgaattccctctttcccatgcacatctcttcggactgtgtcataatttattcttggcttattgttataatataccatcttgtctctgcttgcttttctacttttaaccacttcctgatatagctctctcctttgaaaacaggaaagaaccggaggctgaagcaggccaaagaagaagctcaggctgaaattgaacagtaccgcctgcagagggagaaagaattcaaggccaaggaagctgcggtggggcaccatttgtttttgttactgctttagtttctgatcccctgtcccgccaaggctttcagaatatccagcatagctcagagatcctggtcgaagtttgaaaatgtggtagctgtgtgttttattggctgctcaggcatctgtcttttaggatgatcagtttttccattcatattgatttctaattttcatttattcactcatttaacacgtatctgttaagcagttaacatgcgccaggtactgtgctagatgctagggatcagttgtgaccaggaatagacatggtcccttccctcatggagtgtagcttaccatccagtggtcagggagactcagtaatacagtgcaaatcatgcagagctactactgaaaaatgctgtgacggtcataaacataaatcaaatggagccccactttagtatattgtatatagtacagacatttaccagtgatgtaggctatactatggtgcatacaataatagtacaaaaacagatcacagaaagcatagaggaggcagggacaattgtggaaaggggaaaggatggataagggcctcacagagaaaagaaactatcaggactcttgggtgcaggtaacaaaatataattaaaactgattctaaatgggatgtattggcctatataattaaaaacccaagagcttaaataatatgctcaggactttctctcacctctgtgtttggctttgtatcattctcaagttctacactgtggcctctagtagttccagcatacacacttccaggcccaagtccagtgagtaaaggcacatacctccctccttgcattaagtagcaaaaattttgatcaattttttattttttctttttaagagacagagtcacactctatcattcaggctttagtgcagtggtgtgatcatagctcacggtgacctggagcttctaggcttaagcgatcctcccctgcccagccttctgagtagctaggactgtaggcatgatccatcatgctcagctaattttttttttgtttttgtagagatagggtcttgctgtgttgccttggctggtctcgaactcctggcctcaagtgatcctcacatctcaacctcccaaagtgctggatcatctttgttcttggcaattacagtgccattaaaacgtggctgggcatagtgactcacacctgtaatcccaatactttgggaggctgaggtgggaggattgcttgaagccacaagttcaaaaccagcctgggcaataaaccaagaccctgtctctacaaaaaaataagacaaatacaaataaaacttaacatgtttctttgattcttgaactggggctgataggtgctgtaagttgtcaggctgctcataaaacaatgtagaaatacccttgtgtcagggcagccatcatcttcatttttttttttttttttctgagacggggagttttgctcttgttgcccaggctggagtgcaatggcatgatctcggctcactgcaacctctgcctcccaggttctagcgattcttccacctcaacctcccgagtagctgaaattgcaggcatgcgccaccacatccggctaaatttgtatttttagtagagatggggtttctccttgttggtcaggcttgtcttgaactcccgaccgcaggtgatctgcctgccccggcctcccagagtgctaggatgacaggtgtgagccaccgcgcccagcgccccccgcccctttttttttttttttcctgtccgagatgtagtcttgctctgtcacccaggctggagcgcagtggcgtcatctcagttcactacgacctccacctcccaggttcaaatgattctcctgcctcagcctcccaagtagctgagactgcaggtgtgcgccaccatgcccggctaatttttgtatttttagaagagacgggggtttcactgtgttggccaggctggtcttgaactcctgaccttgtgatctgcctaccttggcctcccaaaatgctgggattacaggcgtgagccaccacgcctggcccatcttcatatttttacattcttttttctttttcgtggcacaggcctaggaggtcccaatgacatgtgccctcatattcttacattctgtgctgtagttgattatagagatggtactggtattgcactgtaaagcacaagctctgattccttttttctttcttttcttttctttttttctttttttttttttttttgagacagtttcactcttgttgcccaggctggagtgcaatggcgcgatcttggctcactgcatcccccacctcccaggttcaagtgattctcctgcctcagcctcccaagtagctgggattacaggtgcccaccaccacgcctggcagttttttttttttttgtctttttagtagagacagggtttcaccatgttggccaggctggtcttgaactcctgacctcaggtgatccacctgcctcagcctcccaaagtgcagggattagaggtgtgagctaccatgctcagccaagctctgaatctttctagcagtgttccattgtaacctctttagtttttgagacaacttagcggagcttggcgtatggtttatattcaagaaacaggtaatggggttctgaacataaaagaatgagttagcaactgagctgttaatgaaatgccccaggagattcctgtaatatgaacagttatagtatagtatgaagagccctaagggcacagtggctcatgcctgtaatgctagcattttgggaggccaaggtgggtggatcgtttgagcccaggagttcaagacctgcctgggcaacatggtgaaactctgactctacaaaaaaaatacagaaattagccgggcatggtggtgtatacgtgtagttccagctacttgggaggctcaggttggaggatggcttgagcccaggaggtggagattgcagtgagccgagatcgtaccactgcactccagcctaggcaacagagtgagactccatctcttaagagaaaatggagtgataaagtcaggcacagtggtgcacacctgtggtcccagctctgcaggaggatctcttgagcttggagtctgaggccatcctgggcaacatagtgagatcccatctcttcgggaaaaaaaaatggagtgatagcctccttataggtcgttgtgaggaataggtaatggagagactcctttgcaaattaatatattatgcaaatatgaagggatgttattagcatatatatatatgtatatatagtgaggcaagaacaggttaggtgaataaaaagggtcagacaaaaaagttacgtcttccagaacgttataggttaagttctaataaagaaggcacagcagttaacaaaaagctggctgtattgtgaagatcatagaaagtaaaagaaaattcatgtcagtgtgtgtgaaattgctaagagaaactgaagaggtaaaatgtttacgctaaaaattcaggtaataaaaaggggcaggctgaggcagatggatcatgaggtcaggagatcgagaccatcctggctaatatggtgaaaccctgtctctactaaaaacacagaaaaaaaaattagccgggcgtggtggctggcgcctgtagtcccagctactcaggaggctgaggcaggagaatggcgtgaacccgggaggcggagcttgcagtgaacggagatcgcgccactgcactccagcctggacgacagagcgagactccaactcaaaaaaaaaaaaaaaaaagtgtgggggcagcaatgagaaattagttttcctctctctcagacctgcagtcctcctcagagccagtcactgttaacaggtttctttttttattcttctagaatatttatatttgcaagaatagatgtgacacactggtgaatccactgttgaacttaagaactaaaacactaaccaataatggtgaaactccttgtatattcctcctaaattgtatcttccttgtgtttgttattcttgtttggagatggggtcttcttgcagttttgctcaggtagggctccaagtcatgatcctcctgcttcagtctctcgaatagctgagactacaggcatgcaccaccacgactggcttgtgtttattattatttaggagtttttaaaaaccttgtatctccccacatttaaaaccacaggtacaaaaacatactaaccacattgatactgttgtatatcttgcttttccccctccttaagctgtattttacagttcactgcaattcctgaatagttctcttgcacagaagcaagttgagtttttaggttgattcctatctttggttaaggctatatagcagattcttttttttttttttttttttttgagacggagtctcgctctgtcgcccaggctggagtgcagtggcgcgatcttggctcactgcaagctccgcctcccgggttcacgccattctcctgcctcagcctcccgagtagctgggactacaggcgcccgctaccacgcccggctaattttttgtatttttagtagagacggggtttcaccgtgttagccaggatggtctcgatctcctgacctcgtgatccgcccgcctcggcctcccaaagtgctgggattacaggcgtgagccaccgcgcccggcctatatagcagattcttagaggagagatgcgaatacatgtctttggaataatttcctagcagtgggaatactgtgtagtttacttttggtagatgtggctcctgttaactctgagaatacctcacatgtgctccagccatgaggtcatattgccagcttctgagtatactgataggtgagcctgggtttctccaaaagtcaacaagtagcttacgaaatgtacctgaccaaccagagcattgttctgataatccctccgtgacatcactccccatctccaggcattgggatcccgtggcagttgcagcactgaagtggagaaggagacccaggagaagatgaccatcctccagacatacttccggcagaacagggatgaagtcttggacaacctcttggcttttgtctgtgacattcggccagaaatccatgaaaactaccgcataaatggatagaagagagaagcacctgtgctgtggagtggcattttagatgccctcacgaatatgaagcttagcacagctctagttacattcttatgatatggcattaaattatttccatatattatataataggtccttccactttttggagagtagcaaatctagcttttttgtacagacttagaaattatctaaagatttcatctttttacctcatatttcttaggaatttaatggttatatgttgtctttttttcctatgtcttttggctcaagcaacatgtatatcagtgttgactttttctttcttagatctagtttaaaaaaaaaaaaaaccacataacaattctttgaagaaaggaagggattaaataatttttttccctaacactttcttgaaggtcaggggctttatctatgaaaaagtagtaaatagttctttgtaacctgtgtgaagcagcagccagccttaaagtagtccattcttgctaatggttagaacagtgaatactagtggaattgtttgggctgcttttagtttctcttaatcaaaattactagatgatagaattcaagaacttgttacatgtattacttggtgtatcgataatcatttaaaagtaaagactctgtcatgcatttttccccattcttttttttttccctgtctccgtgacaaccagtggttcttcatttttgatcatgcgaaatgcattttgacccagatggtctgcagaacttcacttaggacattagcacacaaatagcacacatatcacatacccatttatatacataattagaaaatgttcctgatacatgtgtcatgtgatttcttccaacaaatgttttggaaaacagcaagcaactagtctgtaggttgtcttttctctagagatccttgtcctgggacagcctggggcaagttattaagcatatttccttcctggtgggctagatgatgtgcattatacctgtagtaccttcatactagcccttacaagttaaatgtcctgtggccatcttagccgaaagtctttggttgcaaaatcttataggtaaaaacagttgaaagaacattatgggatttccttgcttgttctgatacaatacaactagatgaccttaaaaaccctcatatttaatatgactcaggattttatttttcagaccactactgtctctagttactgtttcatttctctgttcctttttaatagaattcctcaaaagagtgactggatgagcttttcctgttttttttttttttttttttttttttaaactgttaaaaccctcaaggcttgctgtgccactgaagctgtatgtcaagatcagcaatgtggtccaggttgagaaagctcatcctcttcctccttgaccttcagtactctgacagggttgaccattccttccttgaagcactttttttgagacagggtctcattctgtggcccaggttggagtgcagtggcctggtgtgatctcagctcactgcaacctccgtgtcccgtgttcagtcggcccacctcagtctctcaagtacctaggactacaggcacacaccaccgcacctggctactttttctgtttttagtagagacagggtttctccatgttccctgggctggtctcaaacttctgggctcaagcgatcctcctgccttggcttcccaaagtgctgggattacaggtgtgagccactgcacccagcccactttacttagcttccatcgtgcagtattgtgcttccttgcttctcattctctccctcattcttccttcaactttttttttttttttttttttgagatggagttttgttctgttgcccaggctggagtgtggtggcatgatctcggctcactgcagcctctgcctcccggggttcaggtgattatactgcctcagcctccctagtagctgggactacaggtgtgcgccaccatggccagctaatttttgtgtttttagtagagacagggtttcaccatgttggccaggatggtctcaatctcttgacctcatgatctgcccacctcggcctcccaaagtgctgggattacaggtgtgagccactgcacccggcctccttcagcttaatttattagtcttttcacgctgctgataaagatatacccgagacagggaagaaaaaggtttaattggacttaaagttccacatggctagggaggcctgagaatcatggcgggaggcaaaagacacttcttatatggtgacggcaagagaaaatgaggaaacccctcataaacccataagagctcatgagacttagagaatagcatagaaagacacccctatgattcaattacctccccctgggtccctcccacaacacgtgggaattctgggagatacaattcaagttgagatttgggtagggatgcagccaaaccatatcattctgcctctggcccctccaaatctcatgtcctcacatttcaaaaccaatcataccttcccaatagtccaccaaagacttacttcagtattaacccaaaagtccacagtacaaagtctcatctgagacaaggcaagtccctttgcctatgagcctataaaatcaaaagcaagctagttacttcctagatacaacgggggtacagatattgggtaaacacagctgttccaaatgggagaaattggccaaaacaaagcagttacagggcccatgcaagtctgaaatccagcagggcagtcaaattgtaaagctccgaagtgatctttgacttcaggtctcacatccaggtcacgctgatgcaagaggtgggttctgcccctgtggctttgcagggtacagcctgcagtggtcttgggcagctctgtccctgtggctttgcagggtacagcctccttcctggctgctttcatgggctggtgttgagtgtctgtggcttttccaggtgcatggtgcaagctatcagtggatcccattctggggtctggaggacggtggctgtctcctcacagctccactaggcagtgccccagtagggactctgtgtggggctctgaccccccatttcccttccatactgccctagcagaggttcttcatgagggccccgccccttcagcaaacttttgcctgggtatctaggtgtttccatacatcttctgaaatctaggcggaggttcccagacctcaattcttgacttctgtgcacctgcgggctcaacaccacgtggaagctgccaaagcttggggcttccaccctttgaagccacagactaagctgtacattggcccctttcagccagccatggccagaggggctgggacatggtgccaagtccctaggctgcacacagcacagggaccctgggcctggctcacgcaaccactttttcttcctgagcctccaggcctgtgatgggaagggctctctaataaaaatacaaaaattagccaggcgtggtggtgggtgcccgtagtttcagctactcaggaggctgagatgggagaatcacttgaacctgggaggcagaggttgcagtgagctgagatcacaccacgacaccccagcctgggcaacagagtaatgctctgcctcaaaaaagaaaagctgttagcagttgtagcagaaacatggttttacccgtggaatatccatgggctctgacgtagatattccatgtccagaccatgaaggtctctgacatggcctggagacattttccctatggtcttgaggattaacattagcctccttgctacttacgcaaatttccgcagccagcttgaatttctccccagaaaatgcattttaattttctatcacataggctgcaaattttccaaacttttatgctctgcttcccttataaaactgaatgcctttaacagcacccaagtcacctcttgaatgttttgctgcttagaaatttctaccagataccctaaatcatttctctcaagttcaaagttccataagtcactagggcaggggtaaaatgctgccagtctctttgctaaaacatagcaagagtcacctttgctccagttcccaacaagttcctcatctccatctgagaccacctcagcctggaccttattgttcatattggtatcagcattttgggcaaagccattcaacaagtctctgggaaattccaaacttccccacattttcctgtcttcctctgagccctccaaactgttccaacctctacctgttacccagttccaaagttgcttccacatttttggttatctttttagcagcaccccactcctggtaccaatatactgtatcagtccgttttcatgcggctgataaagacatacctgatactgggaagaaaaagaggtttaattggacttaacagttccacatggctgaggaggtctcagaatcatggcaggaggtgaaaggcacttcttacatggtggaggcaagagaaaatgaggaagaagcaaaagcagcctgataaatctatcagatctcgtgagacttattcactatcatgagaacagcacaggaaagactgacccccatgattcaattacctcccccttggtccctcccacaacacgtgggaattctgggagatgcaattgaagttgaggcttgggtggggacacagccaaaccatatcaccaaggttttgttcttggacttctctaacattctattggtgagaccacattcatttccaggctttattacctatactgaagacccaaatttctatctcaaacccatttctcttgagctgtagtcattaaattgcttatttgatattttgacttggatgtctggtaaacatctccatcttaacatgtcagtttggagggcttaacaaactgtatccagttttgttaaggctttactctccttattgctaagtgtagcaactcctaatctctgccaactgcaaatacagatttcccaaactggagaaacatgaagcaacactcatgttcaagtgcttagactcaatgtttaaatgggttgccaacagtatttttattctggattaatggagttgtgcttatttacttaactgcttgactattaatactgagccaagcaacccaacgttgccagtcacagaaaccaacagcagagaggttttatttttttgagacgctctttcgcccaggctggagtgcagtggcataacgatcagggctcactgcagcttcaacctcttgggctcaagccatctgcctgcctcagactccagagtgcagagattacaggtatgaaccaccatgcctggccgggagggtttccttttgtacacttaatacattatagggctttgtagcagtgtccctggcctctacccactagatgccagcagaaccccttcagttgtgaaacaaaaaatatctccagatattgtcaaatgtcccctgggtgccaaaaaccacccccagattagagaagataaggcactatacaagatgtctggaacattctaggtactcagcaaatgtttcctaattttctaaaatttgctgtccttttctcagactaatcattcttgattacaagtttaataatagctgcatcggtcaggacaggacaggttctgaaatctctgtggcttaatgtaacaaaggtttatttcttacaaaatctgatacaagttgggtgacttcagggtgactgttctccatgtggccgctcagtgatttggattacttccagtttgtgtctctaccatctcaccacatggtttccatgaaatttcagtgatgggaagaaaaagttggcaagcatgcatcagctctcacctgcttcagtcctcaaatgacacttgttctcagcatattggtgtaggtcacgtgtcccgacccaacacaagggaggctaagaaataaggggaagcccatggatattccatgggtaaaaccatgtttctgctacaactgctaacagctttttttttttttttttgagacagagccttactctattgcccaggctggggtgtagtggcatgatttcggctcactgcaacctcccgctcccaggttcaagtgattctcccacctcagcctcctgagtagctgggactacaggcgcccaccaccacgcctggctaatttttgtatttttagtagagatgcggtttcaccatgttggccaggctggtctcgaactgctgacctcaagtgatctgcctgccttggcctcccaaagtgctgggattatggatgtgagccaccatgccctgcctgctaacagctttctatgtgccagctagttgtaagaacttttacatttatattgactaatttaattctttttttttttttatgggatatgagactgagagaggttaaggaaccagcccaaggatgtgcagtgatggagccaagattcaaacttgcaatccggcttttgcatctgtgtttaaccacggtgtgtactgagtattgaacaacttcatagctatataccttttatgtatcttacccatctgattcttttccctttacctctcccaaattgtagagtgatgctcttcagttgccctctgggcaattttatgtcatgtaaacctacagaggatgccctgataaaaggcataaaatatggctcacacctgtaatcccagcactttgggaggccgaggctggtggatcatttgaggccaggagttcgagacgagcctggccaacatagcgaaaccctgtctctactgaaaatacaaaaaatttactggggcgtggtggtgtgcacctgtagtcccagctactcaggatgctgaggcatgagaatcgcttgagcctgggagttggaggttgcagtgagctgagatcgagatcgcaccactgcactccagcctgagtgacagagcaagactccgtctcaaaaaaaaaaaaaaaaaaaagacataaaatagtttacagcaagccattgtgtaaccttgtggtaacatctcacaaattccctgaagaattaccccttccactttctgaatgggggagaggagagggaaacttgtagaaaaaaaaaagtaacttgtcagaggccacatgtccaatctctgcttctatcaagggaaggccattatgttctatgcacatatataaacacacagcagccctgcaggttagacactgtaatcccacttccatggatgagaaagctgaggcccagaggcttacagaatgttcaatgtcacagagcaaggaagtgacagaattgaagtcccatcagatcagcctgcaggctgcaagagaaaacctaccatgctctgccttcaggcttttctcccaggacattagtggactgggtacttggcttcctgtaaccccagtaaagcctttgagcctgattgagtaaggcccgtaactaacattctgcatttgttggtctttattgtactcaagaaaactgatggtaccagaagtcagcaaaagctgttcaacagaaaagaaacgctttgatcagtcttgcgtgttccttgtttttccacctgtttaattatttttctccccttgagggtcattctggcagatctcagagtgtttttctcttgtcaactgatctcacatcacttcagtggctctgaaattactgaaaaagcttcagcacaggcaggcagctctagttttgcttttttttctggttttttttttccttcttgtgcaaatacatgggtcttaagaggcaggttaagcacattctttattgaaagatttggccagtggttcagggagatctagaaggtgaaagatcatcaggtcaacatagatcttctctggcttttaaaaaaatttcagatgccactggctcctgggtcagctgtgaatttaaagccatagtttactgtgtttgaagggatgattgatagggatgggtaggcttgaagagttaaggagcaggcagcctcctttttttcctacttgaaaataacttacggccgggtgcagtggctgacacctataatcctagcattttgggaggccaagatgggtggatcgcttgagcttaggtgatcgatgccagactgggcaacagggggaaaccctgtctctacaaaaaatacaaaagaaaaaaattagttggatatggtggtggcgctgcctatagtctcagctacttgtgggggctaaagcaggaggatcgcttgaacctgggatgcagaggttgcagtgagccaagattgtgccactgcactcctgcctgggtaacaaagttgagatcctgtatcaaaaaacaaaaaagaaaagaaaataacttacaaagcaggatggcagcattctagatgctactgttgatgataagtttaggagagaaacaaggctggttgttcagagagcatgactgggttgtctacaattatcttaggtggtttttaaagatgaaaagaccgatagtctagttacctagttaaaaaagcccaattgccttcaactgcccttgcctcttctccacagccgctagaggggagttctccctcttctgactcttctgaccctggcacttgtctttctgttcatagtgtagaaacagatccctgacccctatctgccccggggggattgctggccttcctgataggaattcagaggattttttcttctgacttaggcccggtttcctgacaaacagcatgtgatctgtctgacttccagcacacctcctgccaagcacagctatgtatttagtcccaagctctcacgtacagttagtctacctctcccatagtggagtccgtcatttgaggatgtgacttccgggagctgaaatcaatgtaatggagccactagcaacggaacattctgtgggacacactttcggaaataatttctaaaatagctcacatttattaacatcaactttataccaggtggcattcaaggtactctatatacataatctaattttcctaccatctctatgaggtaggtattatcatttctattttgcagattaggaaactgaggctacagggtcacagagccaatttgtggtgaagtctggatttaaacccaggtctgtctgagttcccagcctgaattactaatactgcattctttggttcaatttgttcaggccatggcaatgttccaagtagtatgtctccatgaaaagtttaggaagttagtgaatctataactggcacatgagctccaaaagaaaaaaaaaaaaaccaaaaaacaccaagatgtaagttttgatcttttgatctttgccttttcacttactcatccagcagttctgaggttctctcagtaccatctgctgcaacactaaggttctgccaggctggaaaaaagttcattctcttacttcatccaagttatcaaacagtgttggcagctagccctcagccctgggtctgtaacccttacagacacaacaggacagatggagcaactgctgagtaagggtggctttggctggggtttgtggttatttggatttatctatagttgaggccctgatgatttcattcatatttattcattcactacttcatatgcatttaacaattactgaggacagggttaggggcagggggatagctatgaacatgggtagaaacagccctatgcccaaaaggcttactctctttttgggaaaggggacactgaacaatgacaataccatgtgatgggtatgggatgagtgtaggttaagcaagagtagggctggacgcagtggcttacacctgtaatcccagcactttgggaggccgaggcaggtgtattgcttgagctcaagagttcgagaccagcttgggcaacatggtaaaaccctgtctctactaaaaataaaaaattagccgggaatggtggtgcatgcctgtagtcccagatacttgggaggctgaggtgggaggatcacttgagcctaggaggtcggggctgcagtgagccaagatcgcgctgctgtactccagcctgggtgacagagtgagaccctgtctcaaaaaataaaaacacacaaagccagaaacaaacaaacaagagtaactatgagaatgaactatgagaatggggaactggcctaggcccaggacagggcagggctcccagaagaagggccctttcagctgaaacccgagaatgagttggttcgtcaggtagaacgatggggctggggtttggagacaactttccagatgggagagaatggcaaccactgagaactagaagtgagagaacagggggagagggttataggaggaaatgagagatgctctgtatttttggagcatagggtttttacgtgttgggagagagtgagtaaagattagtccagggtaggctgtgggtggggagaggcttgggcccaccacaaggaccttgtggattcaagatgatcactactgaagtctgctttccagcacacctgactggatttcaccctactttcactggattctattgtcctttctccattctacatgagcacccactcctccttgctatgccaggactgaacactggtgacatttcagagatgcaaacacatgatacctcgttgtccaagaatgcaccacacttttactgagcattttcttctaagcatttcatcacttcaattaattcttgcaatctcccagattagcagttatctgcctttcataaatgagggtattgaaactcagagagtgagctgagctgcctgccaatgccacatgccagtaagtggtagagcctggtgggccagctccaaaggcccctgtcttctgtgcctccctggtataggagattgatgtgtcagcactaagttcacgctggagtgaccagcagtgagaatgaagagtaaaggcagcctggcagaaagggcagggggaccacatctggcttcatggaggagggcaaccttgttggagaggtagggtttagatagatggtgatcaggccacacacctgttgcaggatcccttttaatatcctatcatcagtgagtaaagcttcaatatctcttgaggctcttgctcccacgcgtctaaattgttttttgtttttgttttgtttggaaatcaggcacactaaatagggacctggtgtgtattgttcactcttgctcagtacaatgcctgtcccttagcaggtactgaatgtccatttgtggataaataaatgaatgaacttcatttttagtagcccactacctggatccttgtgaatgagggtgcctgggtggtatctacttctcaggttgccaattcctgctcctgcctccaatcatgctgtctctgagggctggccgagcatgcagccagctaagttctggggtctgagagtttcccaacaatttggaatatctgttaaaataaaaaaatgcatgcataggccaggtgcggtggcttacccctgtaatcccagtactttgggaggccaaggcgggtggatcacctgaggtcgggagttcgagaccagcctgggcaacatggtgaaacccctgtctctactaaaaatgcaaaaattagccaggcgtggtggcacacccctgtaatcccagctactcgggaggctgaggtgggagaatcgcttgaacccgggaggtggaggctgcagtgagccaagatcacaccactgcactccagcctgggtgacagagcgagaccccatctcaaaaacaaacaaacaaacaaacaaacaaacaaacaagcatgtacattctgactcagcacatctacttatagaaatgggccaggcatggtggcttgcacgtgtaatcccagcactttgggaggctgaagtgggaggatcacttgagtgtaggagtttgagactagctggggaaacatagtaagaccctgcatctacaaaacaaaaacaaaaacaaaaacaaaaacattagccgggagtggtggcatgcacttttagacccatctaccagagaggctgaggtgggaggatcccttgagcctgagaggagaggccgaggctgcagtgagctgtgactgcaccactgcactccagcctgggcaagagagtgaccctgtctcagaaaaagaaaaagaaaaagaaaaagaaaaagaaaaagaaaaagaaggaaggaaggaaagaaagaaagaaagaaagaaggaaagaaaaagaaacaaagagagaaagaaatgaaagaaggaaagaaaaagaaacaaagaaagaaagagagaaagaaagaaagaaagaaagagaaagagaaagaaagaaatgcaggctgtggcatgtttgcgtgtatgcaacaatgctgctatgtgtatcagggcaaggcctgtcagcaaggctggaaatcaccttcatgtccactaagaaagaagggttaagaaaacaaagaccctttctattaggttggtgcaaaaataatcgcggtttttgcaattttttttttttttgagatggagttttgctcttgttgcccaggctggagtgcaatggcgcaatctcggctcaccgcaacctccacctcccgggttcaagcgattctcctgcctcagtctcccgagtagctgggattacaggcatgcgccaccaggcccggctaattttgtatttttagtagagacggggtttccccatgttgatcaggctggtctcgaactcccgacctcaggtaatcctcccgcctcggcctcccaaagtgctgggattacaggcgtgagccaccgcgcccagcctgtaatgtttttaatggcaaaaaaacgcaataacttttgcgcaaacctaatattaatatagggacgtttatgtgccccttaaaaggaaatgaggcagtgtggcgcgttctggccgatgagcgccaaggtactttgtcgaatgaaaaagcagagtgcccaacagaatagaaaaggccttcctttgtgtaaacgcacacacgcacaggtacatatgtgctctaaggaaaaatacaaggaaagcacaaggttagtgttttcctcaggggaaaggttacttacttttaaccgtagaccctttgaaattacgaaggatggcgatgggagtgagcccttgtgagtatagcaattgggaacacgagtgagtatgtgtctggtagctgtgaacatttcacacacactatctcattaaatcttcacacgacctcatgaagtagctataattatctgctttttacagaaaacgaaggcacaaagaggttaaataatttaccaaagacgataataagaagtggagagacccgaatcacagcctagtctgaccccaaaccaatgctcttaacaatacagcacatacacaattttccattagaaacaagtccccggccaggtgcggtggctcacgcctgtaatcccaacactttgggaggccaagcaagaggatcgcttgaggtcaggagtccgatagcagcctgggcaacacagcgaaacccccgactctaaaaacaacgacaaaaccaaccaaacaaaaaccaaacccaagtccccaataaacttctggtctcaaatactgcctcatccacgggttccgtgattgtgtgtgagggggctggacctctggagtaagccgctcctttacagtggggagacggcgggaacccgtgccccaagatgccgtgcacgtggtcggctccgcgcggaggctccttccggcgtcccgggggggcgctcggctgatgaaacgcggcctccagctccgctccgccgcgggcccgggaggcgcgttccctcttggccccaaagcgagtccggcgggcggctcctcggggttgggcgaccgagcggggccggccgggcggggggcgggcccgtgaaggcggcgcagcgcggcgcgggaggcgtgctgggcgcggggctgcggtgcccagaggctgcggcattaggggctcggcgcccccgaccttccgcgtcccggggtggcggcggcggcggcggcggcggcgcgggcggtgagtgtgcgcgggcccgggcgcgcgcccgtgtcctgcgatccgggcttggtgctgtggggctccggggccgggaagcagcctgggcgcctccgccttggcctgcgttcgggccagacggcctgggttcggcgcggcgggcagcctgcggggggtccttcgtgcgccctggggcccctcccccgcgtgccggccgtgggagcggctctgacaagcctcctgggggcccgcggttggggagggccagactgatttatggggagaaggagatcccccatcctcagccgacctggacagttccagagggcggagactgagactgggacgagacagctgcccaaggccaaggccgtgtatggcgagacagctccagctggcgtgaaggagcctgggtttcaattctggcccagtccaggactggctccttgaccttggatggtacactttcttttctgggtcttaacgtcctcacctgtaaaatggagagctcggactcattgtgtctcaaggtttttccgccccgaaacttctgtaacaggccctcttagggtctcgtgttgtgtttttcacaaacaaaacaaaacctgacttaggaaactgacgaatctcagtgctgcacatagttcccggggaggctgggcactcggtgtctgcagagctgggggcctttgcgcaataggacttaagagtatgttcctttgcagatgctctctacgggctgaaaaagaggggagttgaccttgtgcaagatggatatctggaagttctggttaaaatgcagaatcagcagaggagacccagagaagctctagttttcctgcttagttgcaggggcctcaaggctgtgctcactccccctgctctgcctccaccctgctgtctgtctgaccttctgtgttatcctcgggctggtgcagggctgagctggatggggaaatggggttcaggacatatgataggcatctgcccttgaggtcttgccagcacccctcctgccctctgcagcttcctggttgaatgaggggctgcaaggtgaccacacaggctgccctgatgggcatgtcctggcctctggtccatatccctttctgcttggcactggcctctcttggctctcacctccacctttgccaagcccaggagcctccttcctccaggaagccttccggagaacccttcccccaccccaaccaaggtgctccctctcactgccttgttgcaattgtttgttttgtaattgtctttccctgagtttgtctttcctaccagatggtgatccctagcagggagggctgagtaggaacttcagattttatttccagtttcgtgctcaagatagcacagggcctggcctgagaaggtgcttaggaaatgtctgtggagtaaaaatgatggcagctatatttcttcaatgattcctacttgcccagtgctattttgagtgatttacatgtgtgaactctttaaacctcacaaccacctgaagttactgtcgttatccccacttacatgtaaggaaactgaggcagagaagtaacttactcaaggttacacaggtgagaagcggcaggacagggccggttacttttagctattacaggaaacagcctccaggtgaatggaataaagcctgctgattagtactttgtgagaggctgatggggccaagtagagtgctgtggtttcttctgaaagacattgcctcatggggggattttgcaacaaatggaaccttccacgcagtctgaaaggctacctgtgcaactccagcctgggcatggtccctcgtggctgctcggtcccccaggcctttttgagactctagtacagcttctctgggctgtaggcccctagctacgatgtcccttcgtttcttgtctggaacatggatctcagaattatatctgcctcaggggcctaagagatgatcaaatgaaggagggaagggcttcagtgattatcaagtgcagggcagagatccttgtggctatttttgttggtacaggaagaaagtaaggcgtgatgagagtgagaaacacttagcatatttaggagagtctcctgctgtgggccaggtgaggaggagaaggcccctgccatccccagagtagcatctcagggctgacttgcatttgttgcttgatcttgcctgggaaatgcagtctcccttgactcactcttttttgttttgttttgttttgttttgtaagggtgatttcatgaacattctcagagacagtcacactagagtgcagaggggcaagggcatggaaattatgggcttggaccctggagccagatggcttgggtttatctcctggctccatggctggtagcatagcctcccaaccttgggcaagtcactttacatctttgacctgcggttttttctcctgtaaaataggaaaatcatgttgaggaaaggggcctgtctggtgagccgagtactggatattatgcttgcatttccttctgttacatccccacagcagctataggaggtagacctctctatccccattttacagatgagaacagcaaggttcgggttgttaagtaccttgacagctaatgtcaaagagcatgtatgtggcagagtgggaatttaagtccaggttttctggctctaaagtcttcaatgttttcatagtttgctgctttgtagccttagagcccagtgcagggcagatacatgataattgttaaaggcttgtcttttacatagtcttggttgggagagggggctcctaagtgatcttccagagctgaaaatcggggccagcttcaggtgcatgcaatctgtgcagtcacacagggtcccccacttaggaagcccctcccatttggtttaatgctgtgctgtcgccatcttgaaattcttcattatttttgtagaagaggccccacattttcatttcgcattgggcccattctgtagctgctgctgtttaaagtattgagagaagtgaaaaatggtgagggcatgagagccctgttccccctctagggggcctgatcagtggccatcagcccttgggccagcttggaatcatgaagatgtgtgctgactggccacttcatatcttcacaaacatctagaaccatggcagcaaaagacgattctagtagacctttcaccaagatggttagttagcagggctggtgtgtcatcccaggggacataagcctgattttccttggtgaggggtgattttcaggcctgctggaggacacataacagaggtaaatgtgcaggttgctgctggagggagtggcactggaaactcagtttctcattaaggaaacacccatgacaggtgtcactgccttttttttttttttttttttttaagatggagtctctctctgtcgcccaggctggagggcagtggcgtgatctcggctcactgcagtctctgcctcccgggttcaagtgattctcctgcctcagcctcctgagtagctgggattacaggcgcctgccaccatgcccggctaatttttgtatttttagtagagacggggtttcaccatgtttgccaggctggtctcaaactcctgacctcaagtgatccgcccgcctcagcctcccaaagtgctgggattacaggcgtgagccaccgtgctgggtggtgtcactgcttttgctgatgaacgtgactgagtggttcctgctacgcctctcaatgacctggctgtaggggctttggagagtgtcctttgttcagatgctgttgtatgtcctttatatgtgtcatccattgatcctttgcggcaaccctgtggggagggtacccagatttggagagctgaagctgtctaagattaaaccacttgcccaagttgacataactaagaggtggtagagctggcttaaaaacatttcttttttgaggctagtcaagtgcagtagtgagaaggggagaaaagagtagaacaaggagtttggtctgtaactgactgtgaacacacaattgagataatgcactactttcagagcagcctagaactggcgtttaaactggttagtctgactttggagaccatgttcttcaaaacaaaccaccactgtctctgctagggagcctgattgcttgaatatctgggtatttttgttctctgtggctgctacttttttcttttttttgagacagtgtcttgctctctcaggctggagtgcagtggcacgatctcagctcactgcaacctccgcctcccaggttcaagtgattctcctgcctcagcctcccaagcagctgggattacaggtgcccaccaccatgcctggcctaatttttgtattttttaggagagacggggttttgccatgttggccaggctggtctcaaactcctgacctcaggtgattcgcccactttggcctcccaaagtgctgggattacaggcatgagccaccgtgctcggcctacttttctttttcttttttcttttcttttttttttttttttgagacggagtcttgctctgtcgtccaggctggagtgcagtggcgcgatctctgctcactgcaagctccaccccccgggttcacgccattctcctgcctcagcctcccaagtagctgggactacaggctcccaccaccacgcctggctaattttttgtatttttagtagagacggggtttccccatgttagccaggatggtctcgatctcctgacctcgtgatgtgccagcctcggcctcccaaagtgctgggattacaggtgtgagccaccgcgcctggcttctttttcatttatatttcctaccatctgattttgtttgtttgtttgtttttgtttttgtttttgttttgagacagggtctctctctgtcacccaggctggagtgcagtggtgcaatctcagctcactgcaacctctgccttctgggttcaagctgttctgctgcctcagcctcctgagtagctgggattacaagtgtgcaccaccacacccggctgatttttgtgtttttggtagaggtggggtttcaccatgttggccaggctggtctcaaactcctgacctcaggtgatccacccacctcagcctcccaaagtgctgggattacaggcgtgagccaccgtgcctggctgattttttttttttttaatgtgtattttgcagtgtcttacaggaagctacttgaaatcctgtgtgtaaacaagactccctgtaatgaatatacctgtcctgtgcctggttgcctggggcatcctctgtaagggaacagaaatcccaactgcctggcagtggggcctggtcagctcttgagttccctgtgggcccctggctgtgcctgagctggagaagacccaagaccagaagggaagttctcagtttgggccttggaaggttttagtttctcttcctcctccttctcctcctgggaatttttctcagcatgttcaaaaaggccaaagttggcaaaaagagtccgggtaactctccctggcctttggtgactttggccctggagacagcccctaggaaccccggcttgcccaggctcaggcctgaagttcttttttgtgctgttttctgaaggcatatgatgctgagctggctgctccagaatgaaccacagctctgagaaggggaagtagaaacagctggcgccctgccatggcctgtgaaccacaggtggacccgggggccactggcccattgcccccctcctcccctggctggagtgccctgcctggagggagccctcctggctgggggcaaggtaagatcatgacctttcattttccaccttctttctacctcatgctgaactggactcacagggcacagaagttcctttagataaggtcagggggaggtgtctttgaggccatattctgtcatttttaccagttctgtctcttggccttagaccaagccaccatcactctctgctgagcccctgctgtagcttgcttgttggtcttctcttttccatttattctttacatggcagccagagagctctttattatttatttatatttctgatttatttttacttatttagagacagggtcttgctctgttatcctggctggagtgcagtggcgtgattgtagctcactggagcctggaactcctgggctcaagtaatcctcccacctcagccccctgaacagctgggattacaggcatccaccgctacatcctgctaattaaaaatgttttttgtagagttggggccttactttgttgcccaggctggtctcagactcctggcctcaagcagtcctctggctttgccttcccaaagtgctggggttacaggaatggggcccagaggtttttaattttttattttttttattttttgagatggagtcccactctgttgcccaggttggaatgcagtggcatgatctcggttcactgtagtcttcacctcccaagttcaagcagttctcctgcctcggcttcccgagtagctgggattacaggtacccaccaccacgcccagctaattttcgtatttttagtagagatggggtttcaccatcttggccaggctggtctcgaatttctgacctcaggtgatccgcccaccttgggctcccaaagtgctgggattacaggcgtgagccaccacacctggccccagatatctttttaaaatacacatttagtccaaccatgtcagtttctgctcagtgttttccatggggcttagtgtgaaggcctgccttcatattctttgctgtgctgttttgcctcaggacctttgcacctgcattcccttctgcctgttgtgcttttcccttgcctcctttctcctgatgaatttctattcatccatcagacatggtggctcacacctgtaatcccagcactttgggaggccagggtgggcagatcacttgaggtcaggagttcaaacagtacttgagtacatgtttacctggccaacatggtaaaaccctttctctactaaaaatcagctggatgtggtggcgggcgcctgtaatgccagctactagggaggctgaggcaggataatcacttgaaccagagaggcagaggttgcggtgagccgagatcacaccactggactccagtttgggtgacagagtgagactccatctcaaaaaaaaaaagaaagaaaaagaatttccattcattcttcagaacttagttcaatatcccttccttgaagaatcttcctggtggctcagcctaagtcaggaccctctgatatattcctgtttctccctctagcatttatcatagtctgtaaataattatgtataaagtgttgaagtctggcttcttcactagagtgtaagctccctgaaggaaggggcttctgtctttttcatccctgtatctatagtacctagcacagaccttggcccatagtagatgctcaatcaatattttgttgaatgaaagaattaatgagtagctggatatgggcaaggggaaacagcatccagaattgtgggggcccacgggaatgtggagggttttttagaggctttgaaatttgactgcttaaaaacaaaggcttcttttgttactagtgttgttaggaaagcaatgtgtgtgtatatatgtaaggaaagcagtgtgtacacacacacaaaagtagaacaagatggaatgaaataatttttctatcagaactttgaagacattgcttcactgatttttggcacgtcagttcttgttcctttgtaggaaactgcttccccctctgcgcgtgcgtgcacgcgtgcacacacacacacacacacacacacacagacacacacatttttctttggtagctttacttagcctaggtgtaaaaacaagtatttttaagcggaggacttgctgttctcactttaaggaacagatgagagctggtattgccaagaatccaggaactcttggttcgaaaggcaaacaaagacatcctgaaggatctttgcattgcttgggcaaacacgtaattcagtgtacaacgacctagacctgggaatggttctgagtctccatgcgtggagtccaaatcaacgtggagttttcattcttgctgtggactggagagctggtctgagaccggatctgcttgactgcctgcatttttgcactaccttcccttcttgcttcttgttctcactttcattttccctgtttacaagggagtttcttcacttttcaaaggctcagttttcttttccatgctgatggtaccaagcttcgggggctcttggaggatgaaatgaaatcatgaatgaagcccaagcatagtgcctggtgcttagtaaatggctccacatccagaacctgttcttattgtctgcctttttttttgttgttttttctggttttcctcatttgcttattttaaaatttatttttaggctgggcatggtggctcatgcctgtaatcccagcactttgggaggcctaggtgggtggatcggatcacctgaggtcaggagtttgagaccatcccggccaacatggtgaaaccccatctctatgaaaaatacaaaaaattagccgggtgtggtggcgcacacctgtaatcccagctacccgggaggctgaggcaggagaattgcttgaacctgggaggcggaggttgcagtgagctgagatcgcaccattgcactccagccttggtgacaagagcgaaactccatctcaaaaaaaaaattatttttatagttttagttacttacttattttttttgagacaggatctcactctgttgcccaggctggaatacagtggcgtgattttggctcactgcagccttgacctcccaggctcaggtgatcctcctaccctagtctcccgagtagctgggacgacaggcacgtgccaccacgtctggctaattttttgtatttttttgtagagacggggtttttcaccatgttgcccgggttgatctcaacctcctgggctcaagtaatccacttgcctcagcctcccaaagtgctgggactgcaggcgtgagccaccatgcctggccagttttatcttttcatattttatttttatgaaataaaatatggaacaaggtgtgggagggtaaaaacacaaataaatcaatgttgcttgattgtaacttttgagttgtgacaagcttgcttttaaattatgaaaatagcagccagttattttgtacccatcttgtgctgagcactttatttttatcacgttaattatttgtaaagtcctttgcagtggatgtgtacgtcctctaagcaaggaaacaggcccatgggtttaagtttcctcctcaactttaccatgttagtgagaggccgagctccaatttgaactccaaagctatctagcttgtgttttcaccactcaccacctcgcctccttgtcccccaccacttccaaaaaaaaacaggagagagagaaaaaaagcaaaataaatttctttttggcaggaggtggaatttagaattctgtggaacccttgagatcagagatgatatcccagggtatgaaaaaagaaccttttcctctctgggtgcagtggctcaggcctgtaatcccagcactttgggaggctgacatggaagcattccttgagcccaggaatttgagaccaggctgggcaacatagtgacctcatctctacaaaataaaaaattaaaaaaaaaattagctgagtgtggtggtgcatgcctatgatcccagttacttgggaggctgacgtgggaggattgcttgagccttgggaggtggaggttgcagtgagccatgttagtgtcactgcactccagcctgggtgacagagtgagatgctgtctcaaaaaaaaaaaaaagaaaaagaaccttttcctatcttattaatttgtttatacaccaaacgtgtatttaatgtgcctcctgtttgtatcagatcaggggattcagtgatgaacaaaccagtgtgagagtgtatagtctggtggaaaagatagattttattcaagtaatttcatgcatatgtaatcaaataattgcatacataggtatttagcttgggcgagtattaaggagaagagcgtcagttatggtaggtttagcagaggatttgatcagttaggagtttagagtgtcaaggaggcctctctggggaaagtgaatcatgagctgggatacaaatgatgcatgggctgtaactgggtgaagctaggtagacgtgtcctagagagaggaacagtatatgcaaaggccctggggtgggggagaacatcatgttcagggactgaaggaggcgggtgtggtgagacatagaacgaggctgaggggctcaagctgagtctggcaggaggctagttttcctaagggctggaagaacgtggtaacaaggttggcttttgcaaagcaacaggaagcgattgaaagttttctcaaggcattggtgtcatctgatctgcaccctggccactgtgtggaagatgcattgtagaagtaaaggtaggtttgcagcagaagccacttaggaggctactgcagagggccaagggagaggtgaggatgccaggagggcacagagtggacagatgttttgtttgcctagttggcagggcttggtgatacattgggggagcagggagagagagggtttggataggccaggaatttcctggaaagtggagtgagtcatttggctttgaagactcaagtactgttcagagctagactggggtgacaggagttttggatcagcagacaacacacttatgctttaatctcttctgtcctgcctcattgtctaagcagccgccatagagaatatgccaaaatatccagtcctcagcagtgcatggctgaaacctgggatcctagaatcccagggctggaatctctcccaccccccagacctcctggctgctgaccagtggctcacagggccttgtactgtggtgcaaggagatctcgatccttttgtccagtttctctacttggaactgcaggcaggtaggtttggctttgtgctgctgccattcctccctggtcttgaggggatttcagtccagacttttctctccagctggtctcatggtctggcttcatcctacccttggagggcgggggctttggtagcagttgtgagcagcctgggttgatgcgtgttttttgagggaataaacacgtattttatgcttttgaaatgcggagtgtgttgcagccatacgtaggagggattacagtaaatcagtgtattagttttctattgctgctataacaagttaccactaacatactggcttaaaaccacggatttgggccaggtgcagtggctcatgcctgtaatcccagtactttgggaggccgaggcgggcagataacatgaagctgggagtttgagaccagcctggccaacatggcgaaactgtgtctctactgaaatacaaaaattagccaggcatggtggtgcatgcctgtaatcccagctacttgaaaggctgaggcacaagaatcacttgaacctgggaggtggagattgtagtaagctgagatcgtgccactgcactccagcctgagtgacagagagagactctgtctccaaaaaacaacaacaacaacaacaacaacaacaagccaaaccaaccacagatttgttatttatttatttatttattttgagatggagtttcattcttgttgcccaggctggagtgtaatggcgtgatctcggttcactgcaacctccacctcccaggttcaagcaattctgcctcagcctccccagtagctgggattacaggcacgtgccaccacgcccggctaatttttgtttttagtagagacagggtttcaccatgttggccaggctggtctcgaactcctgacctcaggcgatccatctgcctcggcctcctaaagtgctgggattataggtgtgagccattgcacccagctggatttgttatttcatagttctgtaagttagatgtctgacactgatctcactgagccgaaatccccttggtggcaggactgtttttctttctggaggctctggggagaatccatttcctttccttgtccagccccttggggccacccacattccctggctcatggccctctccctccatggtcaaagcgatcgatgccacatccctccttgcctttcatccatagtcaaatctccctctgactctacttctgtcccgcttttccacgtttaaggttccttgtgatttcatggggcccacccggatgattcaggatagtctccctattaaaggccagctaatgagcccccttacttccaccctttgccatggaaggcagtatatttgcaggctctggggattagggtgtggacatctttggggccattgttctgcctactgtgaccagttatttcttacttagactctctgagcctactgggaatttaacttattcagctgagcattctttgcaatgcttaaataaaggtccactgcatcacccccctcaatgtagtttttcagtctctgtttaaatattccttgtgttggggaacatttttttgtggggacaaaaaatgcctattttttatggggacagcttttgctcttggaaaattcttccttatatggtctcacattgtggtcctaggagcctcctccctctggccttaattctgcctcctgggggcttcccagtcaaatccagtccttctctcaagaggatttgaggatggccaccgtgtccctccttgttgcgaggaggttctcatggccagaggtgtgatgccgccaggcttcgggctcaccccacgagcctggtatggttatcactcagccagatgaagcttctggtctgcttccagagctccacaatggccaggtcctcactgttctccggattgacaatacctgtgcacccatctccttcgacctgggagccgcagaagagcaactgcaaacttggggcatccaggtgagtgctgatttccttgaatccctaccattttctctttcatccattcatccctctatcttttcatccagtttttcacaaaatctttatgaaacagtctgtaccagctgtcgtagggtatataaggaaggtatattagaagtgccctctctttcctctcttcccggttaactcacttaacaaatgtgtatttttttgggtgcccactctgtgccaggcacttaactggctaaacataataggggtggacaggacacagtacctatgtccacagatcccagcggggaagatggacgtgtgtgggagaaattgggacagtatcatataaatgccacagaagaggaatgcacaggcagtgaagacattcacaggagaaaatgagaaacttgcctgggggaagagggcagtggttgtgaaagctttgcagaggagcagatgcttgatctgggatcttgaataaataggaatatgctgggtggagaggaggaagggcattttaggagaggggactgcatatacaagggaaagtccatatgaattcattagataatgatgcagtaccttcaagcatagtgatttgaggccaggcttcacagacctgtggaactggatgcagatctagctccgatgctcactacctgtgtgactttaggaaggtgatttaacctttctgagcctcagttttatcatctgtaaatgtggataatattgatccctattacaaggggtttttgttaagattaaatgcaataatgcttgaggaaccctggcattgtctctagtatatagtaaatgctcaatacattgtagctattattgttatgaagtacctatatgtatgggttttactctcttcccaaagcccccaacatgatcaggcctttcctgtgctagccaaggccaaggaggattaaggattaattatgaatagggtagatatactgctaattttagcctgaagattttagaatttacttcttcttcttttttttttttttttttcaagatagagtgttgctctgttgcccaggctggagtgcagtggcgcaatctgggctcactgcaacctgtgcttcctgggttcaagtgattctgatgcctcagcctcccaagtagctggaactacaagcatgcaccacggctggctaatttttgtattttttagtagagacggggtttcaccatgttggccaggctggtctcgaactcctgacttcaagtgatccacccgcctcggcctcccaaagtgctgggattataggtatgagccaccacgcctggcagattgggttttcttatgggtgaacagtttacgtattgttctaccgtgttcctaaatataatttttttcaattcaattcaattaattaattaattaattttttgagacagagtcttgctctgtggcccaggctggagtacagtggtgtgatctcggctcactgcaacctctgcctcccggcttcaagcaattctcctgcctcagcctcccgagtagctgggattacaggcacgtgccaccatgcccagctaatttttgtatttttagcaggaacagggtttcaccatgttggccaggctggtctcaaactcctgatctcgtgatccgcccgccttgacctcccaaagtgcggggattacaggtgtgagccaccgtgcctggcattcttttttatttttataaaaagagacagggtcttgctatgttgcccagcctggtcttgaactcctaggctcaagcagtccacctgccttggtctcccaaagtgctgggattacaggtgtgagacactgcacctggcctaaatatcattttaatggttaagttctgttttcttagttctactctcacggggcctttatattctatagacgcttttgtttgggcaggaagatgtgagtgttcagtcttttggacagcattaatagatattgatattgcagtattgatagtggcaactctatattgagtgctcactgagggactggccctttgctcagcactgtacatgtattatttaatatgtaccttagttctacaaagtgggtacttttattatccttattttacagaggaaaaaacaggctcagaggagtggggttacttgctccaggtcacacagcacatgagtggcagggccagagtttgggcccagggctgtctgactccagggcctatgccttaaccatcaggctgccctgtgtctgctgcaaggtactgagtctgaggctgtgtggatccttctccagatgtcatgatgcctgttcttccctgagctgagagctgcaccatgtgacttccacccagtgctccaagctcctcattctgcctttgggacagcccagaatgtgcctaatcccccttccacatgatagtcacatgcactggaaactggctgtcctgcggctgattgatctctttccctgggttccaagcaggtcccggctgaccagtacaggagcttggctgagagtgccctcttggagccccaagtgagaagatatatcatctacaactcgaggcctatgcggctggcctttgctgtggtaagggggaggtggcccgcacactgaccctgccctgacagcttatggcaccaccaaattcagcaccgtgtcttggagcctgttggtgtgggtcaggggcttgggggctgttggcccaggtgcctggaaacgagcagtacatatggacattgatttgggatcagaggaaatttatgggagagagttgtaaccaggtcgttgcataaaggatgggagtcagggtttactgtgggcagagcttgggattgggagtctgcagatccacccaggctctgggctcaatatctggccttggccaagactttcctcctctccggaacttggtttccccatctgctcaacagatgggttatttcagctctattcatatatacatgtacatatatatgtgtgtatacacatatgtatatatatataaaatatatgtatacatcttcatattgatacatataaacacttacatacataaatgacagagccaggatttgaacccaggcagtctggtttcagcgtctgtgcttggaaccactgtgatttgctgctgttttgtatgtataaatggtcaaatagcacacctgactcccaggtcccacttctagggagaagggaaaagggtgggaaccagcattgattcattccctggtgagtgctgggctgttacttatgttgccttgttaacccttattacaatgccgtgaaataggtgttattatccccattttacagatgaggaaactgagacttaggggagttataaattgtccaaagccatatagtgcttgaaggatcattatggtctttgaactgatatttgtctcacttcagatccacctgcctttttctgttttatttaaaattaaggtaaacaaggattaggagtagctactaaccctttttgtctacttttgcttataaacaaggaacattagctcattctcacagatccaggtgactgcatcaatctcttactggtgctgtgagctgtctgaatccaaggagggtatcagtagtgtctgaaaggtgtccctttgaatggagctgctttatgcaaggactgaagttcctgaccatgctctctgtctggcatcttgcaggttttctatgtggtggtgtgggccaatatctactctaccagtcagatgtttgccttggggaaccactgggctggcatgctgctcgtgaccctggccgcggtgagcctgaccttgactcttgtgctggtctttgaaagacaccagaagaaggtgagatgtctggagatccctgccacactctctccagaagagcggtgcaggcgtgagaatcagatttttcccttttgcctccctcaaagaatttccctggccatgaaaattcacactagcccgtaagcccagtgactaaaagaaatcaaattgtgtatgtgattgttctctctgcttttcctgtctaatccctgtggattgtttttctggaagcaagctgtgttttgggaatgtgagaggagagcagtaattgcccgtatcctgacagtactttagttaactgagccctctcatgcacttcctctccctgggtgctcacaacagccctatgaacaagggaggattactgaacccaccctgcagcacagggtgcctaaagttgacgtctggggagaggtaatttacattattccctcctgtgacgggcagatgccgacctggtgctctattgacagtcatgtctctaatcccagcaatgacctttgaggcaaggtgggtggtccgagagtttaggtaacttgtcctggatcccactgttagtgacagagccagggttcaaaccctgagccctctggttcctgatcatgttccgaaaggaggtggatacctcccagcttgatgtatgattttaattgttttctgtctcttcagtgtctgtcttttgatatgtactgagcacatcatatgtagtaggtcctctgttaaatgcttacacattaactcattaaatccttcgacattaaatctgggtagaggctgttacactcactttgcagtcgaggaaccctagactcaggctcatagagtagccctggccatgctgctaataaatgccagagttggaaatcaaggccagggcctcagattccaagccatgttcttagccacaacgctagagaaaactgttggttttccaaagctgctgtaacaaattaccatgaacttattggattaaaacaacaccaatttattatcttccagttctgtaggttagatatttgacataggtctcactggactaaaatctaggtacaggcagggctgcttccttctgaaggctctgggggagaatctgttttcttgcctgtttagctcctagtggtcctctgcattccttggctcgtgatccttttcttcatcttcaaagccagcaatggcagatccaatctttttcacatctccttctctggctcttttgcctccctcttctacttttaaggacccttgtgattacattgggccagctggataatctgagataatctcctaattttaaggtcagctgattaacaacataaatttcatcggtggctttaactcccctttgctgtgtaacaacatttgcactggttttggcgaataggatttagacatctttggggaccatttctctgctaccacacctatgttgtctttccacctacttgggaagctcttgttcctccatcccccgatccctggcacagtgctggactctgatcttgcctgactcagaaagagggggcaggatgttgggaaatgtaaatcagcatttggggtgtgaattccacttagtgcgtgtgttcacgagacaaacgggaactatatggtgtactcattctgtaaggatctttgttgggctttgccacaagactgacaaaataatgctgcccttggggtctgttgaagctttcatggcccttgtgtttggcctataaaacaaatcgagctggctactcctgcagcaagaactttgtcttggggaggggaagaagcaaagtgttttgttttagttagcaggagcaagcaaaaaagattggcacctgacaggtgcttcgaggatgtggatgtaattcacatggtggagggaatgcctgctttggctctctgcctctgtctcttctttcctccttttattcagctggtatttatgaagcccttgatagtaccaggacataccttgtcagggccgcacagccaggaaacagcagagctgggctctggcccaggactgacactattgaatttactgttccaacaatatatatctatccatccatccatccatccatccatccatccatccaagacaggtcttactctgtgccaggcacagatcccagaaaatgcgcaaggcttgtgtgcagcatggaggtctcaggtgcatcctggcaatgccatcatcactgtctgctcatttaggagactccttattttcttcctaataatgtccatcatttcatgagcacctattgtatgctgtatgcttggggcttcacgtctatgcccaacaacaaccttataaggaggcaggataccgccgccatttgctagctctgcaacttggggtgagttacttaatctatcagggcctcagtttcctcatctaaaacatgagataataattgtagctccctcatagggttattgtgagaattaaatgacttagacacacaaagtgtttataatagtacctggtgtaaagtaaatgctttgtaagtattaactgttattaactctgtttgccagtgaggaaacggaagttcagagaggttaagtaaccagtccatggccacacagcccttctcaggtcttcttttgggtctcagctccaggacctcctcctccctggatcccttgtcactcaggactatgcagatcccctcttcctgaccattgtcactcttactgttagcatcctctctgttgttacttgatgtctttgagagcatcaatgtctggcataactgtcttgttttccctttggctcactgttagcctttctcaggattggaagatttgggccgggcatggtggctcacacttataatcccagtactttgggaggctcaggtgggaggatcacttgggcccaggagtttgagaccaggctaggcaacattgtgagactctgtctctacaaaaaataaaatcagcggggtgtggtggcacatgcccatagtcctgggaggctgaggtgggaggattgcttgagcctaggagttcaaggctgcagtgagctctgatggcaacattatactccagcctgcctcaaaaaaaaaaaaaaaaaaaaaaaagattggctggtttgtaaaggcaggcaagtcctggcacattgctaggacacatgagaagttccaagttcctacaaatatttgcggctaatatggcacagtgaaaacacaatgatttaagttcactgtcatcctcactgtgatattatcagctgacatgtgttaagtgttcaattctttcaattattctacatggattaactcatttcatccttattatactcctctgaggtaggggcattattatctccatttgggggtaaggagatggaggcacagagatgtttagtaatttgcccaaggttatatgggcagtgagaggtacgttaggaattgaactattggtgatacagatttctagaaggaagaaatccacatcaaatccaaatccacatccaaatcttcttactacagatctaggcaaaacaaaatataattattcctcaattttcatagtagaggcattcctggaaaattcagtgtacattaaactcatgcaaacaatcacgttaagtggctgggcgtgatggctcatgtctgtaatcccagcactttgggaggctgaggtgggagaattgcttgaacctaggagtttgagaccagcctgggcaacatagtgagactcgatctctacaaaaaatttaaaagttagctgagtgtggtggcatgcatgtgtggtcccagctgcttgggaggctgaggtaggaagatctgagctcaggaggtcaagcctgcagtgagctgtgatcgtaccactgcattccaacctgggtgacagagcgagactaggtctccaaaaaaaaaaaaaaaaaaatcactttaggtataaatgtaaactggagttaggttggctgaccagagaattctaagtagatttttttttatctgcatgtatgctcagtgggacatttggaatccaggcagcccaggggacagtcttgaacatgcagaatggtttctaataggacatgtctttcagtggaaggcatgggttcagaacccctggccctcatccactaagtgccagcactgtccatcccatccctgtgacaaccaaagggtcctccttgcatttccaaaatctcccttacagggtgctgccccttttgagaactattattcttgatcaggctgctctcttctaactgagtctgaaagtcctcttgtgcttacttccccaaaccagcatttggggtcctcttgtccctcctcttctcccccacctgtttagcatccactctcccagctgaatgcgtggcgtccattggtttgggtaggagagcaggaggctgattcccagagccccacctgagggccaggcgctgtgttaggtactttaaagtaggtgctttctagatggagtgagtgcttcacttacacaacagatttgatgtgtcagctcaaacagatcaaacccatttgatctcccatcttccgcaaatatcttatgaaccttgacagagtcccaggccctgggttaagtactttacacacaatctcagtgaaatctcactccattcctaggaggcagacacattcttttattctacaactgaagaaaataaggttcagggaagggacataccttgtccagggccatatagctaggaagcagcagagctgggctttatcccagggctgtctgacactattgaatttactgttccaactatcccccatctcattttatttttcttcccttatttttaagagatagagtctcactctgtcacctaggctggagtgcagtggcacaatcatagcttactataacctcacactcctgggctcaagtgatcctctcgcctcaccctcccaagtagttgggactacaggtggatgctaacatgcctagttaatttttttttttttttttgagacagagtctcactctgttgcccaggctggagtgcagtggcgtgatctctgtgcactgcaacctctgcctcctgggttcaagcaattctcctgtctcagcctcccgagtagctgggactacaggtgtgtgtcaccacgcccagctaatttttgtattattagtagagaaggggtttcaccatgttggccaggctggtctcgaactcctgaccttgtgatccacctgcctcggcctcccaaagtgctgggattacaggcgtgaaccaccgcgcctggccccacgtagttaatttttaaacaattttttatagagacggcatctcgctacattgtccaggctggcctcaaacccctggcttcaagaaattctcctgccttagtctctcaaaacactgggattacaggcatgagtcactgtgactgcctccacccccgaccatttaataggggaggaaatgggacagtcctgagggtggggattgtcccttggcatctgggggtgggatggtgtgtttctactgcccagagcctgggagctccccagtagcatggaggtctggtgatgggcctggcgtttgtcttacaggccaacaccaacacggacctgaggctggcagctgccaatggagccctcctgagacaccgggtgctgctgggggtgacagacacagtggaaggatgccagagtgtgattcaggtgctgtgtctcatagttacctcttcctgatggcccagttttatgttgggctaatggagagcagtggcctcatgttctcccagcctacacagtgtttgcagtagtctgctaatgagatggctgttggcagccctttccttcctccctgccctggtgtttcttcctcaagacaccttctctgtgcagtaaccagtggcctggaacctccacgtggcagggctggaagggaagcacagataatgtccacaccttgctgctcacctggcatttattcagcagacggagcctcctctgtgctgtgccctcggttggacactggcgacattgaggggcccatgcaaggtccctgtcctggcagaggatgacaggcatacagtgagacagtcaacagtagcctctctggccttatagcaaacggacagcccccaacaaggctgagaggcaaggtacacagggtccctttgaagggctgcatggagctcaccatggctggggctataccagagtgacacagcggggagagatgaggccggagaggcaggtcagatgctgaaggccttgtttgcctggcttggtcattctctttgccccgaaggttggggggagatctgaaagtgactagtatggcgtggcagggtgggtcagaacacagttaggccagatctcctgatcctggctgaactctcctgttcctccatccatgcctgatctgcccagtggaattgcaaaacctccttggcaccacatctgcattctcaccagtcatggccccttgcctggtgggagcccagaggtaggtgtgcacgggggacctgggaagaggctcctcatgcacctgcctcagttcctccacgaatgtttattgagagcctattgtgtaccaggcactgtcccagggattgaggctgcagcagagaacacatgcaggtccctatgtttgtggagcctatcacacccaagatggtgtaggtataagatgatcttgcctatcattggagtgaagcagatgacatcacaagattctcggcagttcaagtgtgacattgtagactgggagctcctggaatgtgggggtcctttttagcctcgtttatctttgaatctcctttatccgttggcacgtaggagtggcttgacatgtgttagatgaatgcacggatggatagatgactaaagaatgggctgggcgtggtggctcacatctgtaatcccagcactttgggaggctgaggcggatggattgcctgagctcaggagttcgaaaccagcctgggcaacgtggtgaaaccccgtctctactaaaaatataaaaaaattagcagggcgtggcagtgtgcgcctgtagtcccagctacttgggaggctgaggcaggagaatcacttgaacccgggaggcagaggttgcagtgagctgagattgtgccattgcactccacactccagcctgggcaacagagcgagactccatctcaaaaaaaaaaaataaaaacaaaacaaaacaaaaaagagacacatcaggtgggctcagtggctcacccctataatcctagcactttgggaggctgaggcaggtggattgcttgaatctaagagttcaacaccagcagcctgggcaacatggcaaactctgtttctacaaagagtacaaaaactagctgggcatggtgtcgcatgcctgtagtcccagctacttggaaggctgaggtgggaggatcacctgagcgcgggatgtcaaggctgcagtgagctgtgatcgcgccactgcgctccagcctgggtgccagagtgagaccctgtctcaaaaaaaaaagaatggacacatctttttagacaacttgagtctttcagtttctaaatagtatcttgggatgaggtgatacactatctggcatgtccttcagattcactggggggtgcagtggaggttggggtgttggggacgggtaccgagtgaggatggagatgaaccaagagtggccatgaggtgacctaacagttgcagcgggaggatgggttgctgtcatctacttctgaatatgctaggaaattttcatagtaaaaagctttaaaggaaccatttgagaaatcctcccttgtgggtatgacattgggagactagttggcaagaaggctgtgactttgggtctcatgggtcagtcagtgggaggaaggaggtctgggaaccagaggaggtggccagtggatgggagtttggggcaagggccaccagtttctccaagaacttcaattaggatgtgtggcagctgtggtcttgacaggttgtcgtaatgtgaatgtggaagatttcagcctggttaaatttagcttggccggcccctggggtggaaggggaggcacaggtggggtacggacttctcaccctgcttctgtccccacaggcaaccaggttgattacctcagacctggttgtgggccacaggtgtcagctctgaagggtttcactcatttgcatgttcacgccccgcccattgaggatgaaggtagcctcaggtggacaggtgatgtccaggagggttcggagtctgtctgggatgctcagcagcttgtgggaaatggggccgcagccattttgaacagggtttaactttttcttttcttttcttttctttcttttcttttcagacagagtctttctctgtcacccaggctggagtgcagtggtgtgatcttggcttactgcaaccttcacctcccaggttcaagtgattcttgtgcctcaggctcctgagtagctgggattacaggtgtccaccaccacacccagctaattttttgtattttttgtagagatgggtttcaccatgttggccaggctggtcttgaactcctggcctcaagtgatctgcctgcctcggcctcccacagtgctgggattacaggtgtgagccactgcatctggcctagggtttgaccttttctaaacgtgcacacaaagccatttttctaccaaccatacaaatgagacattgtcatggtgccaaatggcaccttcctgccagacagcaggctaaataggactgtctcagggaggaagagttcagggttgggctgcccttgagccacggtggtcactgctgcttctccccacagctttggtttgtctacttcgacctggagaactgtgtgcagtttttgtctgatcatgttcaagaaatgaagactagccaagaggtaagatatcttcagtgaaaaaacaaaacaaaaaccaggaggccaagttgtatcgatttcattatcttaagggtgggaaaatgtctgagaaaaagttacttggaagaatacctacgagcaatcagtggttgttttgcctagggaattatggctgcttttctgcttctttttaatgcctcgcttcttctacatttcctatggtgagcatatatttcttctttttttttttttttttttcctgagacagagtttcactcagttgcccagactggagtgcagtagagtgatctctgctcactgcagccttcgcttcgtgggttcaagcgattctcctgcctcagcctccggagtagctggaattacaggtgcctgccatcacacctggctaatttgttgtatttttagtagagacggggtttcaccatgttggccaggctagtcttaaactcctgacctcaggtgatccgtctgccttggcctcccaaagtgctgggattacaggtgtgagccaccacgcccggccatatatttctttataattataatattaataaattttggtggattccaaagtatcatgcattgaggcaacttttacttgttcacagtgcctttctaccgtttattaagaaaatcagagggatcttgctctgcttctacagaggaggaaacaggctccgggatgacctgttaccggcctgtggtcatggagctggctggtgatgcccaggtttggaggccaggcctcctgtctccaagccctgggctccttctctaggattagccttttctgagccccggctgcagtgagtcttgaagtcagagttgtgacttagccctgaatttggctcattagttcctgtgtggcctcaggcagggcctttgagtctcagtttattcatttgcaacatatggataaagatacccacatcccaggctgctttgagcaagtgagagcatgagaggaaaaatatttgtttgtttgttttgaggcagagtcttgctgtgtcacccaggctggagtgcagtggcgccatcttgacacactgcaacctctgcctcccaggttcaagcgattctcatgcctcagcctcctgagtagctgggactacaggtgcgtgccaccacaccaggctaatttttgtatttttagtggtgactgggtttcaccatattggccaggccggtcttgaactcctagtctcaagtgatccctctgccttggcctcccaaagtgctgggattacaggcatgagccaccatgcctggttataaaaggaaaaatatttagagctattaatgaccatctgtagggaattatgtaatatcccgaatgcgaccagctttttctgaggtcatcatctgagtctgagacctcatcttctgctcggtctgcagcttggggagggactcagcctcgcagataccacctgatttaggcactcctgagccccttctctgtttcctttgcagtccttgctgagaagcagattgagccagttgtgtgttgtcatggagactggggtgagccctgcaacagcggaggggcctgagaacttggaggatgctcctctcctgcccggcaattcttgtcctaacgagaggccactcatgcagactgagcttcatcagcttgttcctgaggctgagccggaggtaacaggcactggggcttgttggggccatcttccctcgggggaatttgcatagagaaagcctatgtgggggcttcttagattccccaagacatgcttctctcagttagtagacaccacacaaatctagctcaggagttttcaatcttttcattcttcaccctagcacttaaaaagatagttaacaggaagcattttatatttattgggactttttgttgcattatttaatatcttggatattctttttgatggttgcattggatgggtagttgcatgttgatagattatagcttacttaaccatgaacatactgatgaacatttgggtctcagtcaatcaattatttattcatctatccaaccattcatccatctactttaattgcagttagacagttgactcttctttgaatttttttttgtttagaacagggtctcactcccgtcacccaggctggggtgcagtggtgtgatcactgctcattatggcctcaacttcccaggttcaagcaatcctcccaccttagtctcctgagtagttgggactgtaggcatgtgccaccacacctggctaattttttgtatttttattagaggcagggttttgccatgttgcccaggctggtctccaactcctgggctcaagagatctacccacctcaacctcccacttctttgcatttctgttgaatttcagttcctgcagccccagagttctgttgggtcctgccatccacactgtctcttggctatggctaagcactggcagaccagaattctgaaaatgtgcagcttgtgcttaccttcttctcatgatgaggacagacccactgtcagggagacaagcagtgatggtgacctcaggtgacatttgaaacttcagaagagcacttatatcttttcagccaagagatttggggattcaaggtccaaaccagtccaggcttactcttttgtgctggtgggcagtaggaagcctgcaagtagtactatttaaaagagaaaatgacaggaacatgcggtggctcgtgcctgtaatcccagcactttgggaggctgaggcgcgaggatcatttgagtccaggagttcaagttgatccttccgcctcagcctcccaaagtcctaggattacaggcatgagccaccatgcccggcctctattaaaatcttttatctttttatattaatttttaaatttttatttagagacggggttttaccatgttgccaaggcttgtcttgaactcctgagctcaagcgatccacccgcttcatcctcccaaagtgttaggatcacaggtgtgagcactgtgccctgccaaaatattaaaaaaaaaaaagagagaaatgataactgtattaacctcttcactttatcctattgactttttttttttttaaagagaagagattgataaggttgtgtactttcttgtgacatgcgtgtgtgggtttttgtgcaatagccctttaaatatgggtcttttaagtgattatttttagatttactcaaaccaatagtaatataatttcctatcatgagtatcaagtgtgtgcacatgtttttaaagtagctgcccttataatttagttaatgaaaatataatcgatgcccaagtctcaacctgggccagatggtcacatttcagtaggaacctagtgtctgtaaaagatggaaagatagcgataatgacctcttacatttttacagatttttctcatgcataaaattcattagcatactcttcgaggtatgaattattttccctttttccttggtgggtgaaataaggttccaagaggtcagctgactggcccaaggttgccagaaagggagagtgcagtaagcccatggcagaagccagccctgctgattctaagtaggccagtgttcttgctacagttccttgcttcttacattattgattttagagtaaactggcgagaagaccaatctgagttagtgagtggtaaactatttgaagtgttttatattttctagcacaaaggataacttgaaacaaaagctaatcttatgaaccatgtggggtttctgcttttttgagtgataatgatggaaagatattgatgccatttgtggagcactaggcactgggctcaatgctttctgtctattagtctctctctctctctttttttttttcgagagggagttttgctcttttgcccaggctagagtgaagtggtgtgatctccgctcactgcaaactccatctcccaggttcaagcaatcctcctgcctcagcctcccaagtagctaggattacaggcgtctgccatgatggctggctaatttttgtatttttagtagagatgggttttcaccatgttggccaggctggtcttgaactcttgacctcagatgatccacctgcctcggcctcccaaagtgctaggattacaggtgtgagccaccgcgcccggcctctattagtctctttaatcctcactgtaacttagaggggtcagtgccactattttccttattctaccaatgaagaaatgggctcagtaatgtgaagtgactgctctgggttagtcatagagtggctgagttgaaactccctcttggcctttttgactttaaagcctatccttaattactaactctacagacatacctagcgtaacccacacttcatttcattacattcagagtggacacaagtattgcaaaagagcttcaaccccatgcttaaggaagttaagcatttcccctgagatcccatcttctagaccagtgaatggatctttacagaccaactgtgttaataagaatgtgcattaaggcctagcgccgtggctcacgcctgtaatcccaacactgtagggaggccaaggcaggagcccaggagttcaagaccagcctgagcaacatagtaagatcacatgtcttttttttttgaaacggagttttgctctttttgcccaggctggagtgcaatggcgccatcttggctcactgcaacctctgcctccgggttcaagtgattctcctgcctcaacctcccaaatagctgggattacaggcatgtgccaccacacctggctaaattttttttgtgtttttagtagagacggggtttcaccatgttgacaggctggtcttgaactcctgacctcaagtaatctctcctgccttggcctctcaaagtgctgggattacaggcatgagccactgtacccggctgtactgtgtctttaaaaaagaaaaaaaaaagtacattacattcaattttttaatccttttttacttaaaattgttttattgtggcaaatatacataatataaaatgtaccatcttaaccattttaagtatatagttcagcagcatgaggtacattcacatcgttatgcaaccatcaccatcagccatctgcagaatgttttcctcttcccaaattgaagctctgtgctcattaaacactaacttccccttccctccttcctccccaccctcaacccctagaaaccaccattttactttctctccctgtgaactgattactctaggtgcctcctattagtggaatcatacagtacatgtccttttgtgataaacctaatttttataagcaatctcttttttcccttttttatgtttttctttctttttttttactgtcagtgatcatatttaaatgtaagcagtttcttttaatatgttaggagtacttgtgtaaagaaatctaccaggtaccttgtatgaattaactaattctgctataatgggaatattcctctccccacctccacatttaactagtaattttcttcaagtgagtcactttgatctcatgtactttacagactcatagacatttgaaagtggaaaaaatgtatttgtggctggctaggtttactttctttttatatttttaaaatatatttttaattttaattttatttttgtagagacagagtctcgctctgttgcccaggctggtctcaaactcctgacctcaagtgatcttcctacctcggcctcccaaagtgctgggattacaggtttgaacaaccatgcctggccagctaggcttaaaaaattagataattagaaatttggtaatttctctagggcttcgaggttgcatattttttttgtgcgtattattattgccattcagcagttagttactcaccttggcaacgaggacattgaggctgcaggagccccacaggccatgagttgcagaactgggcttctggaccaggctggcatcttctgagagtcctaggtgctgacctggcctggttcttcctagagagcatcactgctgggtccaggggcaagaaagcagcatgtccttcccctggtgcctaagccctttttcctcaaggggctcccctgtggtattcaatctgcttccctgcctcttctaggaaatggcccgccagctgctggcagtgtttggcggctactacatccggcttctagtgacctcccagctccctcaggcaatggggacacgacacacgaactctccgagaattccatgcccctgccagctcatagaagcctacatcctaggcacagggtgctgcccgttcctggcgaggtgacctagggatgaaggtactcatcttccttcaagactgagcagtcaggaaggcttcaggagcccaagatggccaatggggagccccaggtgaggagagaagcatctgggggcactccaaaaggggcctgtgatgtcagccactggggtgttgtgctcacttcagggcccagcacaaaaatccttgtttgacatctcatgctgaccccctggcctttgcagaagctgatggttacagagctagtcccaccaaagctactctctctgctgcttagaactgtggacacgtatggaaagactggacccccattgctttcattgttcagagaacccaggagacatgaagatgaccagactgggcaaattatgtgtccaaaacttggcctcagatgatgtttccatctccaaccccttcatgccagatggggaaactgaggctcagagaggatactgctctatgtggcattgccttgaacccctaaaattatcagacttcctttttccaatataaagaaaaaaagtaagttttcagaattctctcaatttttaagtttttctcccccatattttgtgaaaagcagtggtatgtgtacgtgttgtctaccagtacacaggctgcagaagacagagacagaagaaagagatcaagggcagataactgttgataggaatatttgagaaagattgatcctgtttgacttgaggacttattttgttcacaggcatgcacgcttgtggttgtggttttatattacagatgtagaacaatggttatgtttcccgacatgaacattgtcctggaatgaagtgtgatcagccacttgtggaattctttgaagagctcagaggcttccaagtgatctgctcctgaacaagtttgaagacctattgtttcatagacccaagaccaaacgcatctaaaggatccccagcccccaagacctagcctttgtctgcgattttggcttcatctcccacaaaacccctttatgagttcacgctctttcctggactgacatacctattcctttccatttgttggactcctattcatgcttcaaagtccagctttcttaagcccttctttaggaagccttcccacacagccaaccctgctgctctctgcctcctttaaattcttgatacagctgctgcttgttctgatgttttatggtattgattctgttttcctgtgtatatgccagtttttctagctagactgtaaactccttaaggacagagactacaccttgtactttttgtgcatgacctggacctgctaaggaaaaaaaaatcttgtggattgattgctttgccatccccacagcagcttttgcaaattgctttccaaactcacttgaatgatgacattgctgtggacctgggttctggacctgatctgccacttcaagctgtgtaatttttggcaagttgctttctttgcctggtcctcagtttgcccatcaatataatgggtggattggatgatttttttttttttaattgagatggagtcttgcactgtcacccaggctggagtgcagtggcgcgatcttggctcactgcaacccccgccacctaggttcaagtgattctcatgcctcagcctcccaagtagctgggactacaggtgtgcaccactactcctggatatttttttgtgtttttagtagagatggggtttcgccatgttggccaagctggtcttgaactcctgacctcaggtgatccacccgcctcgggctcccaaagtgctgggattacagacgtgaggcaccacaaccagcctggatgattcttaagggcccttctaggaccaaagttctgggaatttctagcttattctgccccctcatagcccttggcctatctatctttatccacatgcagaaacatctggcaaccccacatggctgagatgacctggtcctaggacacccttggacagaagactggcctacctagcagacctggatttttcttcctgatctgctgcttccaagttgtgtgaccttggctaagtcacttaacctttctgattgtcatttcgctttttaataaagtgggtctggtgaacaagaaatgtaataaacacgtggcttgccattcaagagatgagtctgaccattcactttctgtgtgccagagaagagagatcatgggtatagaccagcccctggaaaggctgctttggtcaaggctgagagcagctttgctcaaggaaattattcacgaaggtgaccactgtctttctgacctggcacagaggaaatgttggctgtgaatgtgaccaatagaaagaagcccgtatttctcagtcagtcctagaaccccggtaagtaattaacagagaataaaaatgtgtttgttaaatgacaaagcagcagtttttcaattgtaaggtctgcttgagagcctttgatgtgtgtttcttttcctgacttttcctttctttagaatttttgatggtctcacctggtgggtggggctttcagggtatgcccacaatgtacatttctcggcatctgtgcctcagtttcctcatttataaaatccctatgatctctgtctcacctactttacagggttgctgtgaagatcgcatactacacacaggaatgctcatcagtttttaaattttatttaatttttatttatttttttttaaatgtaattttttcagagagataaggtcttgctatgttacccagcctagtcttgaactcctggcctcaagtgatcctcctgccttggcctcccatgctgctgggattacaggtgtgaactaccatgcccagccagctcctaagtcttaaggctctgtgttagtgatagatgtggccatggtgtaggcagtgcaatgtcttcgagtgagagtgaaggtggtaactcattgcatggattctagagttctgtttattctaatccaagttcttccacttaaaaacaatgttcttcctctcattgagtctcattcctcatctataggatgggaataagagcatgtacctggcaggttgttgtaaggattaaatggtgtaaaaaaatgtcaagtgcttgcaactttgaataccaaacttgagtgaaagctcaataaattgttacttaaaaaattttttgtctcgcatattgtagatacctgatgtatatttttgttgatctagcaggtcattaaccgttaaggttattcagtctgcctcagacctcagctatttcagtgccatggggtatatttatgtcaataaagattttagtcaaatctctggaattcagcatccagagataatatagcaaggagataaagagcaagctggtgactttgggccagatactcactcttactgtactttctgtacctaatttcctcatgtattaaggggggagtgtgataataagggggattaacgggagtgattgatgtgaagcacaaagcctggtccacagtaagggctcagtcagtgggggcgtttcttctgcagctgctggctgctgttggctcctagtttatgttatcctatgttatcttatagttgagtgtttttacacttaggtctgtgattcattttgagttagtttttctgaaggttgtaaggtctccatctggattaattttttgcatattgttccagcaccatctgttgaaaagactctctttgctccattgtattgcctttgctttttttttttttttttcaaggatcagttgactatacttatgtgggtctatttctgggctctctatttgttccattgatctatgtgtctgttctttcccaataacacactgtcttgattactgtagctttatagtaagtcttgaaattgggtagtgtgagtcctccaacttagttcttctctcccaatgttgatttggctattgtgtgtcttatgcctttccatgtaaactttagaatcagtttgtcaatatccacaaactaactcactgtttattttgattgggattgcatcaaatccatagatcaagttgcaagaactgacattttcacaatattgatttctatccacaaacatagaatctgtcttcatttatttagttgttctttgatttcttttatcagttttgtaggggtttttcccttttcctacagtttttttttttttggtaatttttcttatagatcttgtacatattttgttagatttataagatttatacctaaatatcttatttttgggggtgctaataaaaatagtattgtgtatttagtttcaaatttcatttgttcattgctagttatgggaaagtgattgaattttatctactcacattgtatcctgcaaccttgctataatctcttattagttttaggagtttctttgttgattcttttgttgatgagataatcatctcacctgtaaacaaagacagttttatttcttccttcctcatctgtatatctgtatactttttatttccttttcttgtcctatttcattggcttggacttccagtatgatgttgaagagtagtggtaagagggaacattcttgccttgtttatgattgtagtgggagtttctagtgtctcactattttttgtttgtttgtttgagacagagtcttgctctgttgcccaggctggagtatagtggtacaatctcagctcactggaacctccacctcctgggttcaagcaattttcctacctcagcctcccgaatagctgggattacaggcctgcacaaccatacctgactaatttttatatgttttatttttttatttttttatttttatttttctttagtagagatggggtttctccatgttggccagcctggtctcaaactcctgaccttaggtgatctgccctccttggcctcccaaagtgctgggattacaggcgtgagccaccatgcctggcattcactattaaatataatgttagctccggactttctggtaggttttttttgttttattttgttttattttgagacagtgtcttgctccatcaccaggctggagtgcagtggcccgatctcacctcactgcaacctctacttcctgagttcaagcaattctcctgcctcagcctctggagtagctaggactataggcgtgtgccaccacgcccagctaatttttttgtgtttttagtagagatcgggtttcaccatgttggccaggatggtcttgatcacttgaccttgtgatccgcccgcctcagcctcccaaagtgctagggattacaggtgtgagccaccattcccggccctagtaggttttttgttttgttttgagacagggtctcactctgttatccaggctggaggctggagtgcagtggcacaatcatagcttactgcagccttgatctcccgagctcaagcaatccttctgagtagctgggtctatatgccatttatttttttttttgaaatgggatctcactctgtcacccaggttggagtggagtagtgggatcttggctcactgcaacctctgcctcccaggctcaagtgatcctctcacctcagcctcctgagtagctgggaccacaggcatgcaccaccatgcttggctaccaaaaggtagagacagggttctgtcatgttgatgttgctcagtttggtcttgaactcctgagttcaggtgatccacccaccttggcttcccaaagtgctgagattacaggcgtgagccactgtgcctggcctgggccaccacatccagccataattttttagttttttgtagagatggggtctcactatgttgcccaggctgatcttgaactcctggagttgatcctcccacctcagccttccagagtgttgagatttcaggcctgagccaccatgcctagatgagatattctttaacaagttgagaaagtttcttctctattccttgcttactgagaggaaattagctttcttttgattagtcattgcgtagtatatctttgttcatccttttacttttgaccttttcacattcttatatttaaggtttcacccttgtaggcatgtaagatttgcttttttgaaattaagtttttttctaattcaaagtatttactacactatatctaatgtgtttactgatagacttaggtttgaatgtaccatcttactaataattctttctatcggtttttctgttactgtgttcttttcttttttctgtcttttttccttgttttggattaaggttgtttgttttgggtaatttctcctttattagcatatgaagtatacttttctttcagttcttaccctagatttaacaagcatccttgacttactgaagtgtattatacatgatcacttctatcatttcctggataacccagcgactacacaattttttttttttttttttttggagacggagtctccctctgtggcctgggctagagtgcagtggtacgatcttggctcactgcaacctccgcctcccaggttcaagtgattctcccgcctcagcctcccgagtagctggaattgcaagtgtgcaccaccacaccctgatgatttttgtatttttagtagagacagagtttcactatgttgtccaggctcgtctcgatctcctgaccttaagtgatccacctgcctcagcctcccaaagtgctgggattacaggtgagagccaccgtgcctggctccaacaactatacaattctttcacctttctacctgttacggtagtcttgtcatggatttcaattttctatgtattttaagccacaacagacattcttattaatgctttctatagtcaatattcatttagatttattcacatgttactttttattgctctttgttacttcaattttattgccctttgttcctttctgtatttccatacatctattttggatcctgcttctggaactaactttagaatttttcttcaatatagtatcatatttagtatagtatatttagaaatacctttagtattttcctttcagtacagatcttatggtgacaaattcaatttttgtttgctgagaagtctgtattttgtttttatttttgaaagatatttttggtaagtaaggaattctaggttagtgcagttattttctttcaaccttttgaagatgtcattggtttctgttgcttctgttgagaagtcatctgtcagccccattgctgctctcaacattttctctttgcattgagttttagcagttatattctgatgtgcctagctgtagcttttaaagtatttttcctgcttgtgcttgttcatagcacatcttgaaactgtgacatgatatctttcatcacagcattcaccctcttctctctcatcttgttcaggactctaatgataagtgttagaccttttcactatatctctaagacccttcttggtatttttccattcttttggttctttgtgattcagcctggatattttctactgactcgtcttctccattaatcttgccctcatttgtgtttaattctatcaatggagtttttttgttaaccctatgtttcatttaaaaatcaatccagtttctaatttttttatctttttttttttttttaagaggcagggtcttgctctgttgcccaggctggagtgcagtagcacaatcacagctcactgcaaccttaaactcctgggacctaagactcccaagtagctaggactataggcaggtgccaccatgcctggccaatttttaaatgttttgtagagacggggttttgctgtgttgcccaggctggtcttgaacttctggcctcaagtaatcctcctgcctctgcctcctgaagcactgggattacagctgtgagccaccatgcccagcctgagtttttaatttcatccatcataatgttcagttctataattttgtttttttagaaatagtttccagttctcaaatgaaattaccaatcttgtcatctattctcctcaatatttaattgtactgcttttaaagtttatgtctgcaaactctaatatctggttcttttttttttccttttgcttttcagtcagttggtcttattttttgatattcatggtaatttttcattaaatgctagacattttgaaaaatgaaaattttgaaaaattgaagagatatacaaggctctggatcttccctcaggcaggatttacttttgcttctgggaaaagtaggcttgagataaacttgaccctgggctttgtgagagctagtctaggtgtgattaaaccttactctcaggttgtagccctacaggggttttagctgaaaacgtgtgtgtgtgtgtttataaaaccaggactcctctttcatggtgagtcctaaacctccaatttttgttaccccaagctgtgagacattttttttttttttttttttttttgagacagagactcgctctgtctcccaggctggagtgcagtggcatgatcttggctcactgcaagctccgcctcccaggtccacgccattctcctgcctcagcctccccagtagctgggactacaggcgcccaccaccacacgcggctaattttttgtatttttagtagagacggggtttcactgtgttagccaggatggtcttgatctcctgaccttgtgatccacctgtctcggcctcccaaagtgctgggattacaggcgtgagcccccacgcctggccgctgtgagacttctgaaagctctactcaacttttcagctacttggactctgcttaggactcggcaggtgcctcaaggggataagaaggcttcggtgctcatctcctctctctacttttctcttcagcatcttggcccctcgtgtcctgactatgttgatatctctctgatgcattcaaacacatttaagaaaaaagaacaattgcttttaaactgctgtcagcaggagggttggtctgatacaagctagtttaccatgatcagaagtaaatccagctgtggtttccatgattatttttattgttactatttgaaaatccttcaaagaaagatgtcaccctgtggctgagagccctttaaaaaagtcacaggatggaggcttctttgcatcccttctgtgaaggagtttctaaattatcaaagcaggaagtgacatttaaggagcatcttttttgtgtaaagcacctgctacagttgttgcagaaagcagtccaagaaataaggaatatggggtttgctggggaaggaaagtgggaccttcgcatgagaggaggtgaggaatgcataggacaaggggaatctgggtaagagggtgggtccaggggatacagtatgagaatgggcagtggaagaggactctggacatgaggtccgggaaagtgaactgtatcttcacccaacagatgccagtggggtctcatcccatggggaagaggtgccacgatgcagtgagctgacaactccacacacatgttgtaggcctctctgcttccttccagctatagttcttttaccttttcctgctaaatattgccaaccttcttaatatggtcatctggatgtcccataggcccctccagcttggaatagcccaaaattaagtgatctgctgttgttgtcaacttggcctcaataccacaaggacctcattccctagaatcttctttcctgtatggttctgagttagaattggccagctttgcctgagaaatatgactcaaggtcctcttattcatcctgactgctgctgccctactttaggcctgtatcactgtctgtcctgattgcctaggcagtcgcttaatttgttttgttttgttttggtagagatcgggtcttgctgtgttgcccaggctgatctcaaactcctggcctcaagtgatactcctgcctctgcctcctgtatttctggggccacagacataagcccagcctcttaatttgatttctgcattagtcatgatccacttgggagacagaaaccacataacaatttgaatatgagaagattaatataagtactaactagaacaggggattggagtaatgaaggagtggtaagaagtcaggagagctttaaagaatataggaataatggacataaggagcagccagcacccctagaactaagaaagaacacccccaggctctatccccagctgagatccagatgttgctgggaagggcatggctgtgcctcacaatggcagagaagtctgggagaatgttctagaagtctgcccttgggtgccagggaaagctgtcatggaacagtgtctgattagaggcacacctatttgtgggggcactaggagaagctgctagttgccaagtgctactgaccaccatcctctgcaggattcctgttctggaaaagttgcctgcactgcgggagggtgatgttggagaagctgtgagctctgtgctgttaagatgagcccagcacaaccagaaaggaaggcctcttcctcctccaatgtctctagctccccctcctgacagagcctagcattgcaccaactaccaaaagaaaaatatttaaagggccagctccatttttgaagagcaggcgatgaacagtaaatttggggtccagagtaataactgaatgtcattctaccattatcgaggggccgcataaccaagttgttaagagtgtggactctgcagttgggtttcttgagttaaagtcttagctctggcacttaatgtgagttagtgtaaaccttaaaagatttatttaacctgtgtctcacttccctaatctgtaaaatcaggtagtaacagttctaaccttgttgggttattgtgctgattgggttgatatttatgaagcacttggaagaggatctggcacagagtaagcaaggaaccaggctgtctattgtgattactattacactcaaatcgtggtggcatgcgcctgtagtcctagctacttgggaggctgaggcaggagaatcgcttgaacccgagaggtggaggttgcagtgagctgagatcgcaccactgcactccagcctggatgacagagcgagactccgtctcaaaaaacaaaacaaaacaaaacaaaatccatccttcacattatagccaggatgggcttttcattgaaggtatgaattttactccacattgccatggcatagacatcatattcctttattcttctcttttctgaggtggggaaggcataaggagtgctaattaataaattgtcttctggccgggtgtagtggctcacgcctgtaatcccaggactttgggaggttgagatgggcggatcacctgaggtcaggagtttaagaccagcctgaacaaaatggcaaaaccccgtctctactaaaaatacaaaaattaggccgggcgcggtagctcacgcctgtaatcccagcgttttgggaggctgaggcgggcggatcacctgaggtcaggagttggagaccagcctgatcaacatggagaaaccctgtctctactaaaaatacaaaattagccaggcatggtggagggtgcctgtaatcccagctactcaggaggctgaggcaggagaatcgcttgaacccgggaggcagaggttgctgtgagccgaaagtgtgccattgcactccagcctgggcaacgaaagagaaactccgtctcaaaaaaaaaattaaaaaaaaaaattagctgggtgtggtggcactttcctgtagctacttgggaggctgaggcaggagaatccttgaacctgggaggtggaggttgcagccagccaagatcatgccactgccctccaggctgggtgacagagcaagactccgtctcagacaaacagacaaacaaacaaaaaaagtgttgtcttccaactcgccttgtttgttatggtctgaatgttaatgttcccccaaattcatgtgttgaaatcttaactcccaaggtgatggtataagaattgtggtctttgggaggtttaggaggattaggtcatgagagcagagccctcacgattgagattagtgcccttatgaaagagcctgagagagaccccttgccccttctgctatgtgagaacacagcaagaagcgccctctatgaggaacaggccctcaccagacactgatgctgctggagttttgatcttggacttcccagcctccaaaactgtgagaaataaacttctgttgtttgtaagtcacccggttatggtatcttattttagtagtctgaacagactaaggcactgttcatagtacaaaagttggaaatcaggctgtgtcactttgttgcttaaaactcacctgtggcttcccattattttcaagatagagttcagctccttttccctggatacaaagctcttgatgctctgcccacttcacctcccaccaaaccctggctcaggttttcacttgagtcattctagacttggtactttgctaccctcatgccctcccaggtcgtgcccctattttccaactttgctgattgtattccctccttctggaatatcatcccttctccttttagctaacttcccttcaagcaccatcgcctccaggaagccttccattaatccccgagtcagttgcaaaatgctcctttgtcattttgctttccaagtttttgccctattatgtcagagtgatacacttccatgcctggctccctggctaatgtggaaaccatgtggggtcttctgcatattactcacagttgcatactccgtgtttcagcacaagcggtgctgcgtatcagcactggctacgcattgcataactctagggctgctgtttgtagagtttttcacaacatgccctgctgttccctatggccctgagcgtcaaatggagtcgcacagtaggcaagcagaattgtgccctgaagctctggacgtttatgacagtggcctgttatacaaactggcctctcctaatatagcacttccctgttaggttggttaggagtgactgaaacaaatgtgttaatgcgttaaaatgacaaaaccacatttctttccaagaggtgccagggtctaattgctccatgtttttgggaatctcagaggtagggctggcaaagggggaaggaggagagacacttcctctgatgtgaccaaggactttaattggaggcggctcccccccacggtggctttttcagaagctggagtgactcttggtggtggcacagggatggctcagacgtcttctcctcctgcaggggagtttctgaatcagtcttcatgactcttgtccactgccctcttcctcatggaagcccagcagctgtgcagccgcagggaccacgtgggtgccgccggctagaatgctcatggcctcctaaggatgcacgccttgagcatcatgcggttgtcataggggaggcgtggatgtctttttggtacagcactgtggagagaatttgtgttcagatctgaaagaacagaggaataaacttatcctgggtaaaggctttgagtgatgcgcgtataacctatcttggccatactccactcagagactcctcaaatcattaatctctttaaaaataaaagtttgcttgtatgagctaagaatgatctcgagctgggtgaagcaatggagattttagagtttactcattacctcagcgtggcccagctgatccttatacacatccacagatatcatttgttgaatgtctttttttttgttttgaggtggagtctcgctctgtcgctcaggctggagtgcagtggcgcgatctcggctcactgcaagctccgcctcctcggttcactccattctcctgcctcagcctcctgagtagctgggactacaggcgcccaccaccatgccccgctaattttttgtatttttagtagagacggggtttcaccgtgttagccaggatggtctcgatctcctgacctcgtgatctgcccgcctcagtctcccaaagtgctgggattacaggcgtgagccaccgtgcccggccttgttgaatgtcttctttgtgtggggccatatgcattcacttacacacggtgcctgccttcatcctcctaacagcctgcacagtgggcaatatattatcgttatcctcattttggagagaaggatgctgaggcttagagagggagggtcggcgacatgcccaaactcagtaagcagcagaggcagagtttaaactaccatctaataaagtaccacaaactcagtgagaaattaaataaatcaacaaatggccatggaggactaaagccagtgatttcaacgaatatctaccacctaataactaatctctaataactgatagagtctttagactgtgttgttccaggcttgagtaactacgccctttccacactcccagaaggctgaaagaagtctgactatgtcccagcaggaggtggccggggaggccgaggcgcagagaatcattcaggtgttcctgacactatcacacacccacgtctggaacctactgaaggaccgtggatgatgctgttcgaacattcttggattgtggaagccaacagtggtggaagacccctcgctggtcttgcggcaacaacagaagatcttggaccccatgttttggtgcgcggtgggaggaggaaagggcactggggctcctggctctgcagctccaatcccagaaacccattgttatttaagcgctgggtcatagtgggcccttcccctctctctgacctgctgtagctccctgtggccagcagttccaggcccacctgcctgggcccaccactctgagggtcagtctttcctcaactgtgcacatttctcctacctgtggaaaggacatggagcctccactctgccagtctttccctgtagcgttgccttcttgaaccacagatgttggaggtccagcacagttctctgggcagggttgttttctagatgaacttaagactgtagctggaaaacgtgaatctctgctttgccaggtcctatggcagcagaaccccaggagatgcggcagcccacacagacaagcttgtgtttaagggtcagatttgccttctctctaggtgtatgtgtgctcttgggttggttctgtaatctctttgtgcctcactttattttattttatttatttattttttgagacagggtcttgctttgtagcccaggcaggagtgaagtggcaaaatcatagctcactgcagcctcgaactcctaggctcaagtgatcctcttgcctcagcttcctgagtagctgggactacaggtgtgtgacaccgtatctggctaatttttttttttttaaactttttgtagagaccggatcttgctattctgcccaggctggtcttaaactcttcgcctcaagagatccttctgcctcagcctcccaaagtgctggaattacaggcatgagtcactttgcccagccactggcctccctttcttatctggaaaatgggaacagtaataccaccttggagtaatgagtgtttaattgtctgtaaactggccgctctgatgggaggtaccccaaagtactttctgtgctcattgtcttcccatatggtttgttggctccattattccagctgggcccaggtcccacaggagcatgatgatgaagcccagctttgctggtcccagtcctggcactgccactaacttgctgtgtggctttgggctagcccatactgaggccccccgcatctgcaacaggaagtcagtgggctgcgtcatctatctttccaaggattctcccagctctgatgaccgaaggttgtaagtctatgttattcccaacctcctttctcttttccaggctctggccatctgctgttgctcccctttctctgtggccaaagccccactctggaaatttccatcatcggtggtcgtgtgtcgatcacagcacactgggttcactccatggcctcatccttgggtagtgagttcccacccgtccagtgctcctctccagcctcagtcaccagcatctcctacttggattattgcaacggctcctaagcatcagcattaagcaccaacacagatgaatcctcctcctacagacattagatcatgtcacacctctgcccagacctcccagtggcttccagtatcatgttgaataaaagaaaagtctttccctgggcctgtcttgaaaaaactcataatctaaccatttatccacttgtccctcactgtctcctgctactttacccttcacccctttcccgccacaccaaacacaccactgtttgcatttctgctggaacgctcttcccctagaaatccacaagactcattctctcacttgtttcaagcctttgcttaaagaacacttcatctttttttttttttttttgaatggagtatcactctattgcccaggctggagggcagtggggcgatctcagctcactaacctctgcctttggggttcaggcgattcttattccttagcctcctgagtagctgggattacaggtgcgcaccaccatgcccggctaatttttgtgtttttagtagagacggggtttcaccatgttggccaggctggtctcaaactcctgacctcaggaaatctgcctgcctcggcctcccaagttgcaaggattacaggcgtgagccaccatgcctggccatgaacactttttctagtgaggccttctctggcctatttactctatttaattctctctgtttattccctctgtttaagcctcctccctgctcccagcactctctatttcccttccccacctcatgcttctctgcagcccttgtcatgttcagaagtagcctagaatttatttatgagcacgtactcactttcccattagtaaacccaggaaggcagggagtctcctgtgttcactgctgggtccccagtgcagggtgtaggacaggtggttaacagcatttatggcatggttggatgaacctgtatgtatctcactttggtctagggtccaagcaggtgctgtcaccggggagcagcaaggaatgtcacaacaagtaagacaccacctgcctcatccacctgccaagctgatggatggctttatggatgacttatagggttgcttttggctgccttctgatgggaccacctctcttctccaccctctccatcccaaacttgcttttcctcctctcatgtttcctattttggggacaggtaccactattcattttgtgtctgcagctagaaatggggcaccccttacctcccctccgctcacattcatcaaggccttttgaatctatcccataaatatctccattgtcagccaccctccgttgccattgccctcaccactagcgcctcctgcctttggatcctgaccactgctttcccactagcctctctggtggctcatctgcaaccagaagatctgcccctggtgcaaatcctgttaggtcactcctcctctgccttaacccctcagtggctcccctgttctgctgctcgaacttgtctgaggatctgcccctgtcgactttgccagctccgttcattccaactcagtcactactcttcggccataggagctgctggctgtgctccagactttttcttactgttccatccctgtgcctctgcacaagctgaaacctgcccctccatgtcctctcctcatcacacttgaagacagctcaggtgtcacttccttcaagaagccattcctttttttttttttttttttgagacagagtctcactgtatcacccaggctggagtgcagtggtgcgatcttggctcacttcaaccatcctccaccctttgggcttaagcgattcttttgcctcagcctcctgagtagctgggattataggtgcacaccatcacacccagctaatttttgtatttttagtagagacagagttgtgccatgttggtcaggctggtcttgaattcccgatctcaagtgatctgcccgcctctgtctcccaagttgctggggttacaggtgtgagccaccatacccagccaggaagccatctcttaaacctgggatgaattgaggcatttcctttatggttcccttgtcccctgggcttccctgtgtcctggacctgactgtcattccagtgtctgcctaaaccacagtggatgctcagtaatatttgttgaatggactgtattttcactgcctgtttatttgcctacaaaaaatcagtgattaaaaaaatttgttcagcatatactttttgaggacctactggtgccaagcactgactgtggtgctggggatactgccgtggacaagagcaacagagcctcactctcgaggaggcaggggtgggtccagcccaccttcgggtcccaggatgcagcaccgggctgtgtgcagaacgcgtatgctctccatactgattgaataaatacaggaacattgtctgactgttggacaatggtacgctcaatccttcaccctgttctcccttccatgaacaggcttttttttttctttaatgtcagaaagttatgggaatagaaacagaacactgacattcattgagcatttgggcaggtcctttgacattgctgagctcatttcattttcctctccaccttgcaaggcaggactttgtctgattttccagatggagggaattgagcctaagaaaggtgacttgctcagctgtggcagccaagaggaacagctgggattttaatgtagttttatctgaagccagattttattccgtctatacaattccagaatgagatgttcagaaccaccttgatctccaagagttgatggtaagtggtttttaaatggaaaggctccatctgaagcctggcagaacagcataacagttaagagcacactccttttttacttagatggacttcagttcttaattcctgttgcaccttgctgtgtaatttcgggccgtttagcttccttgaacctcagttttccagtctgtgcagtggtatggtgaaacctacccgcagaatgccgttgtaaggatttggtgacataaagatgtcaagtgctttgcagggtatgcggtacacagtaggcgtttaatatcactgagatgctggctgggacagagtaggggtgggtgtggtgtttcttgcattaccagtgtccgcctctagagggaagcaggagccaaagaaaagggcccttgggctgtccccactgggctgtgagtttcaggtctctagggaccccacagcaccttgatcagaataagaaagatcaatgaagtcaaacaggaagtcgtctggagctaggggagccctcaggagtctttcagcacagtgggggagactgagacccagagacagagaaacagtggggtcaaggcaaataaggggtgcttcttgtagcaaagtgaataggtgtccaggagtggcggggacattttctgttttagtacagaaaaattacgccctcttacccttaggtctaacctatgagtctcattcacctgcagctggcagagtggacaggaggctgtctgtgatgtcacagagtgggggaaccggggaatgttggggacagtggggtttggactgaaccacaaaggcagggaggagggaggacatatgctgagcccctctccagcagtccattcctttgtccaccatgctgtaatgtccactgtgcctatcaggtcggctggagtggttctgcctcacatgtctcttaccccttttgggttagtaggctagccaggtgtgttcttcttctggggctgctagaggaagacacagcaagccccactgtgaaaacacatttctaagcccctgttagtgtcctatctgttatgttttcattggccaagcaagtcatatgacaatttagttccttctccccaggaaggggatgttggtgaattcccgactgctgccacctcctctcctgtcctggcctctgtgctgttgtggcagaaacatgccccagagtgggctgcagattctcccaatgtgattagatggggcccacccaggtaattgtgaattatctcaaggtcactgattagcaaccttaattgtatcttcaactttaatcttttgcagtggggtcattattctgtctaccactgtgtttaaacacttgtatcaagaaaataaaagaatgaaataatttcccaattcttaaagctggaaaaagagcaacaaagtaaggaaaagaaagtataagattaaaagcagaatttactagagtattaaaaagcagatctaattaatcaaaatctttttttgaaaaaaattaacaaaatagaaatactgtgtagcttaatcaggaaaaaaaggagaaagcaaaaatatataaaattagaaagaataagggggaaaaattgttgaaacaaaagaaattttaaaaatctttagagtccataatatacttttatgtaaaaaagtttgaaaaactatgaagtagatagttttctgggaaaatagtttattaaattgactgcattaaagatagaaactatcaatttctgtagaagaaatttattaagaaactaccctcccccaaacaggcaacaggtccagaaggttgcacaaggagagtttcaccaagcttttaaagaccagttacagtactacataaattgttctagagcatataaaataaaacttccaaattctttttgtgaagcaagtgtatattgataaccgcatgtgatagggataatcaaaaagaaaattacaaggcaacgttacctaccaatactgatacaaaaattcttaataaaatattagtgaacagaatccaacctcacagtatgaagataataaatcatgatcaggtgaaatttatctgtggaatggaagtttgattcgatatgagtaaagaaattgtgattttttttatagatgctgaaaaaagaaaaaagagggaattgatggatattatattaatatgataaaatggcactctctctctctctctttatctctacctctatgcctttgtcctaaacccaacttcttccttaatttgcaaatactggagctatttaaaatcaggaacgaagcacagatatctactgactttaacattgtagcggtggcattaaccattgcaatcagaaaaggtaaattggagacataaaaattagaagaagaagaagttaaagtatttctacttgcagattacataatagtattactggtaaaccatcggaaagcaaaaacaaaactactcaaacaatgaaagaattcagaagggaagcaaggcatacaattagcatactgaactcaatagtgttattatacgcaagcaataactaactacaacaatagtgagagagaaaacttcatttacaatagcaacaaaagataaaatacctaggagtaaagttaataagaaatttgcaaaattaatataaagaactcttgaaaatagtcctgaaagccaacaaagtaggtttgaacaaatgaaaagacattggttggtggttaggaagaatcaatgttatagatgtgtcagttcttcctgatttataattttccctaatttgtaaatttagcacaatcatgatgaaaataacatcaagattttttctgaagctagacaaattgatcctaacatttacatgaaaaaacaagcaagaataaaacaggcattgggcgacagtgagactccgtctcaaaaaacaaacaaacaaacaaacaaacaaacaaacaaacaaaaaaacaggcagactccccagtggagtagaatagaaagttcagaaagagacacaaatatatatgaaaatttagtgtatgataataaaggtgtcatctcagatggatgattggaccaaagatattctccttaataaatatgctgaaatgactatataatcatttggagaaagtgtaaagttagatccatacttcctaaatacataataataaatgccaaatggaataggttatatttctgatgtataatgctatacaagcaaacgaagaagtgtgggtgaattcctctataaactggatgtagggaaaggctaacgacaacccaaagtccagattcaatgaaacattaataaacttgactttgaggagctagtatttctagtatataaagagcactcaaaaattaacaggaaacaggaaaaagaaaaaagagtggaagacataaacagatcattaataaaaacatataaaaatgacccttaaacatatgaatagatgttagtcttcactcatggtaagggaaatgcaggttaaaaccaaaatgagataccgtttctcacctgtaggattgggagagcctaaacagttgctgagggcatgaggaaacaggtatctcagatatcatatactcttacagaacagaacttggcagcatctaacaaaactgtatatatcttttccatttggctcaaaagtccatgctgaaaaattaaccctaaagatacaccgtattaatccgttctcatgctgttaataaagatataccttggcctggcacagtggctcacgcctgtaatcccgcactttgggaggttgaggagggcggatcacctgaggtcaggagttcg

SEQ ID NO: 5671 - DNA, 55885 bp, Homo sapiens
  GLTDC1 gene - 135741447 - 135757331 of chr9; NCBI Entrez Gene ID: 360203; Build 35; sequence includes 20,000 bases upstream of initiation codon and 20,000 bases downstream of termination codon of the gene
gagcagtgcaatgctaagtacctgagtccatttcaacggagcctcttgacacaacttggcaatgaatgtttttaggctgcggttcattctcttagcttgtccagaagattgaggtctccacactgactgcagcgtccacttcatttccaatgcttcgttcatttgttgagttatctcagaggtgcacaaaggcccattatcattttggattacgtcggggagcccgtatcgtggtatgctttccttgagcaaaactttacttcagttgctcattcggagtgacatgggcacacttccacccagtcagagaaggtgcccactagaactagggggtatttgcattcccaggggctggtggcatctgtgtgaagtctatttgctggttttctggtgagtgactgcctctttcttgttgcccaggctgccctcggctatgattattaggctcattccgggcgcacagatgacagtgttgaatgatattctctacgtgggcctttagtcttttccctttcaaataattttgtacaaaggccaatgaagcgactctctcaaagtgcaggctatcgtgaacgtactttaacagcgggtggacgagatgcactgccgcccagcctatgcctgcgctgtttcctctctagcctccacccttcctcctttagtttgaatcctttatcttctgcagcctttttatcttcagaagcataccggggctcgagggccgtgaagtctatttgggaaattaagggcgcctggatttcgatgctgtcactggctgaatgcccggcggtgcagtctgcgaaaacattaccccttgccacttcggaattactgcgtcgatggccagggcaatgcattatggctatttcctgtggggcctttatcgcttctaacttttttttttttttttttgagatggagtctccctctgccgcccaggctggagtgcagtggcgcgattttggctcactgcaacctcagcttcctcagttcaagcgattcttttgtgattctcagcctcccaagtagctgggattacaggcacgcgccaccgcgcctgggtaatttttgtatttttagtagagacggggtttcaccattttggccaggctggtctcgaattcctgacctcaggtgacccacctgccttggcctcccagagtgctgggattactggtgtgagccaccacacccggcccacctctaacaattctaacacttgcttagcatttttaactttggtgttatccgctcttagccaccctccttccctccagatagctctgtgggcgtgaactatcatgaatgcgtacttggaattagcgtgtatgttggcgctcttaacttgggacagttgtaagggcgattaactctgccttctgtgtcaaggttcctgccgacgaagttcttgcctctgttacctctgaggaggtcaccacggcatacatggtgttgctcttcctgtcggtgaccaagctactcccacctgcaaacaaggtcagtctgtacgcgggagggctacagcctttaggtcgggtggctggagaacacttggtctatgacctctagacagttatgtagagtttctccagctcctcggtggcagggaatagtggagcagggtttagagttctggtggtttgcagctttatttcggggtcgtctaaaaggatggcttgatagctacccaactggcctgctgtcagccagtaacctcctttgtgctgcaataacactgacatgtggtggggcgtatgtattgtgacaggccgccccaaggtcagcgtctcagctccctcgagtagcaggcaagcagcaacaactgctcgaaggtggaaggcccagccagcccttggctaccacgtcaagctgctttgaaacatgtgctatgggttgtaacgcttcgcctcacctttgcattaagactccaagtgccaaacccagtctctcgtgcacatccagttggaagggctgaggaggatttggaagccctaaggcgggggtgaagattcacttacacttcggttgttgatcgagtgatggtgcctttcttcccactcgaaaagatcgtggtcggcccctttcaacagttcacatgagggctttcccattaatccatagttaggaatccaaatccgacaaaatctggccatatctgtgaagctgcttagccgctttctcctggctggctcgccaaattgtacccagactgaacccggggttgggcagctaattctcacggcttgataacgagatgcagatgaactgggaaagaagagagtttgcttctgtaaatgggtactgagataatagcaccagaccaactcaaaattactaagttttccagagcttatataccttcaaagctgtatgtctatgtgtaagtgtgcattcccctaagacataagtgatgaacttcttctaatctataacgaacgcctgagtcctgaagatcttcctctggagcctcagtaaatttatttaatctggaggggtccaggtgctggggtgattacccttatcttgtctcctgctaaatcatggaggtttggggcgttcctttagaccccaataaaacttgtttaatcctaaatgggtcctgttaagaattcctttgttatcttgtcatgcttcaaggcccaggaaacgcctgggcaaaactcttggtggacttttgttacattctaacctttgtagaagggtgctggctctctcaccttttaattttttttttttttttgagacagagtcttgctctgtcacccaggctggagtgcagtggcgtgatcttggctcactgcaatctctgcctccctgcctcccaggttcaagcgattctcttgcctcagtctcctgagtactcagctgggattacaggcacgtgccaccacgcctgtctaatttttgtatttttagtagaaacggggtttcatcatgttgggcaggctggtcttgaactcctgacctcaggtgatccgcctgcctcagcctccgaaagtgctgggattacaggtgtgagccaccgcgcctggccagcttttaatatttaacttaatcactcagtcagtgctgaaagttgttatgggggcctgcctgttcagctgctagtgaaacctgacctgctacaacagcgcggagccacacctgccctaactccatctcctctttcatcagccaggaaaacgatgctgcccacaggtgcacacctgcagaggccgcgacccatgtagaacataagtgtcccaggagagaggccgaagcctggttccaggagtggcccagaggatggacattcatgaccctggtgagcagggtgtgcttagtggttggcctggccgggggatccagcccagggccgctctgcatacagcaccctggggccctcccatctgggatccacttgcttgacccctcgagcttagagaggggcacccacccccaccaagccctcttctgtcaagttccccagggaaacctgatgagtggcagtggccccctctgaccagctcccaccctgctctactttctgagtctgaggacagaggagggatgtgaaagcatttagggccccaggcagagggtctgggtgagggcgagggattctcaggaactcgggggcagcagagcctcctcctgagacgtcagaggggaggatgcccctcgtgctgtggcctctgtgaaggagcctcagcaagacccggcgaagggtgaccaggcagagggacggaaggtgcagtgctgcagaggcagcaatgaggtggtgcatggccaggcacagagaggaggcagaggccagtgagccaggggcgggcggggtcggaactaagcttggagaggtggagggcagagagccagggcgggggcttcctctcattccctgtgcggcgggaggcctgcggagaagtggaacctgccctgagctttgcccatggctgctgagaagcagtcctgaccgagtcactcctccacaggacagggcatttgggaggtggggctggatccagcctgcctggctgccccggctctgccctccctggagaatcaacagggtgttcctgactgagcagcctgctaggcagatgagccctcagcaccatccagacaggccttcccagccgctgagtcccggccagctggacagagggcacagcctgcagcagctgccttagcactagatgcccctgggctgtgccttcctgcatcttgcttggtttcccttctgttgaaacagagtggaactgacaagggcatatctgagtagatgaattcccttttcacaagattttcacaagaaggttttctggcaggtggatttgcagctaaagtgacagtagatgttatctggggtgtagatggaggcttttccctgcatcttcccctgctgtgcttagacagggatctgtttggtggaggagtcccccccaccccttccctacccaagagatagtcatcattagccggcctctctaggcacccatgtccttccccaaatccatcactatcccttctctgtctctgttttaggaacttttagagatcttctattttcgtactcaaaacctgccttcagccctagcctgtaaggtatttaatgcacaggagaggcgggcagggcacccataagtccaagggtctggctgagttcctggcacacacaggcacaacaggtctcaatcaatatgaaagaaaggatgaatgagggatgggagtagaaggagccgttgggaaaggggcgggaggaaggatctgggtgcctttctggggccagcccgcttctcttctttaaccattgaagccctcaaagtcatctctggagaaagacacagaccacagacagtttctgggattcctagatctgtcaggaagtgacagtctttacttgtcacatgtcagtgacatggggccagtttttccaaggggcttttatgccggtcttccatcagtgtggccttgatattaatatttaatttgtagagaaactccgaactaattttatctctcataatcagccctgagaatctcacgtgctcacctcttctagaggcgctggatagtgttaatatccagtcctgtgtctcatgaatgcaggttattttgattgtcatctcatgggtctgaagaggaggctttaactgctgttcgtgtttaaggtttagtaggctttgtgtcctttctagaccggagtcaaagccctgtaacttaatggcacaaggtctttaaaagcaatacctagagttacacagatactgtaaccttattttttttaatctcagctttcctaggacttgaattagttagacacataggaagagtgtgtcctgggtcagaaatgaaagtttccaacttcatagaagaatttgaagccaagagcacagaaggttatattgaaagaaaacatttcctttagatcttttttttttttttttttagatggagtctcgctttgttgcccaggctgcagtgcagtggcatgatcttggctcactgcaaactccatctcccgggtttgaacaattctcctgccttagcctcccaagtagctgggattacaggtgccagccacacctggctaatttttttgtatttttagtagagatggcgtttcaccatgttgatcaggctggttttgaattcctgacctaatgagggccgcctgcctctgcctcccaaagtactaggattacaggtgtgagcccctgtgcctggctgagatccttaagataaaatattctgtggcatcaggccacaacagcagttagaacctgaggaaactagttacgggagatgatgagtaatttgcaggagaaacttatttcaggccttcttgaaggggagagaaagctgaaaacagtgagatgcaataaaagttaaacttttgcattaaaaaaattaaaatctcttgtaattttattgagtaaatcaataccttaagaaaattttgttgttctaaccaattctttaattagtgtattttaatatcaaaacccaacctctagagagactattgtaatttccttttaattagaaccaacttgattatgtaaagttttttcataaattccctttttgtaaaccttattaccacttacacaaaccatttacaatatgcttggagttcgtgttttatcctaaacatccctctttcttaaacaaccagtcattttattttaggacaaaaaaattaccacataagattttttctcatataaaattattttcccttcttaccaaaaatacctcttcatatttataacattctttatatctctcttatgtactggttccttttaccttgtgtgatggttaatacatcatgtcaacttgattgtattgaaggatgcaaagtattgttcctgggagtgtctgtgagggtgttgccaaaggagattcacatttgagtcagtggactggcagaggcggactcaccctcaatttgggtggacaccatctaatcagctgccagcacagccagaataaaaagcaggcaggcccggtgcggtggctcaagcctgtaatcccaggactttgggaggctgaggcgggcggatcacaaggtcaggagatcgagacaatcctggctaacatggtgaaacctcgtctctactaaaaatacaaaaaaattagccgggcgtggtggcgggcacctgtagtcccagctactcaggaggttgaggcaggagaatggcatgaatccaggaggtggagcttgcagtgagccaagatcgtgctaatgcactccagcctgggcgacagagcgagactccatctcaaaaaaaaaaaaaaaaatgcagacacagaagaacataaaaagactagactggcctagcctcccagcctacatctttctcctgtgctggatccttcctgcccttgaacatcggactccaagttcttcagttttgggactcacactggctgtcctcactcctcagcttgcagacagcctactgtaggaccttgtgattgtgtaagttaatgcttaataaactcccctttatatgtatatatctatcctattagttctgtccctctagagaaccctgactaatacaccttgtttcaaaaatgacctttaaatagcctttgaattagacaaaaattatttccttttcataaaaacacattatttttcagaaaaatgttttctcctataatcaaatttttgttaaaaaaattggaaacgatacagacatttaacaaatattatttaatttgctataactttagattttaaattctatgatgtttatttgcaagcatttagtccattacacttaattaattaatttttaatagtttgcctagattgcttatgaaaattatgatagtcaggtaaaccaaaagtaaaattgtaagccccccaaccatccgattggacctgtcctctctgccacatgcattccaaagttaacctgaaaaactagctcaggccaagatgggaagagggagttggacataccttattaccatcaacacagaccttcagactgagaggacagacgctttaagtctgataagaaacatttacaatctattctctctgaaacctccgcctggaggcttcacctgcgtgataaaactttggtctccacaaccccttatcgtaactcagacattcctttctactgatttcaggtctttaggtaataaccaactgctgatcagaacatctttgcatctgcctatgacttggaaggccccatttccagctgtctggctttttctggactgaaccaaggtacatcttacatgtattgattgatgtcgtatgtctccctaaaatgtgtgaaaaagttgtggcccaaccagcctggtcacaagtcatcaggaccttctgaggctgcgtcatgggtgtgaaaggaaaatctcttgggccccccaaatcactaagctaaagggaaaagtcaagctgggaagtgctttgggcaaacctgcctctcattctattgaaaatcatccctcggctcactgggttaaatacatatttgatgtctcctttggagaggctcatcagaaactccaaagaatacaaccatttatctcttatctacctatgacctggaagcccccctcccagcttcgagttgtcccgcctttccggactgaactaatgttcatcttacgtatgttgattgatgtctcatgtctccctaaaatgcataaaaccaaactgtgcttggaccaccgtgggcacctgtcatcaggacctcctgaggctgtgtcgtggacaaatgtccccaactttgacaaaattaacattctaaattaaatgagacctgtctcagattttgggggctcacatggcatgtccttaaccttggcaaaagaaacttctaaattcattgggacctgtctcagatatattttggcttacagtcatcatttaaagttatttccttgttgaccatttttatagccagtgaatttcaggtgtttacctaagtaagaatcttaaggttaaataaatgaattttttggccaataacacaggatttactgtttttattaaattaacattagaccaataaatctaaataataatgtatgttgacaattctgaagacatttctaattttattttaccaattattttaaagttaggttatttattaaagatttactgaagtcatatgaacttgaaaagtatttgcacttatttacttaatttattggcactcctttttttttaagccaatttggtaccttgtggtcacaacacataacaaaacacacgcatgcacacataaacacacctaagcatgcacgcgcgtacacactcacacacatgcacacacaccacacgcacacacacatgcacacactgacacatttgcacacacactcgcacatgcacacaccacacatgcacacactcgcacacacaaaactcacatgacacacacgtgcacacacactcgcacacaccacacactcgcacacgcacatgcatacatttgcgcacacacacaccacacacttgcacatgcacatgaacacattcacatacatgcacacacacactcgcacacacaccacacacatgcacactcacacacacactcgcacaatcacacatgtgcacgcgtgcgcgcacacacacacacaaataaaggtcccatagcttttgccttggaattccagccaggaggtaccaatgcaaactcaccagtttacaaaagaacggttggatgtgaatagcggtttttatcttcgacaccagcagaaaggtcctttaaactagaaaaaaaatatgtttcattgagcaaaaaccacatcctcatgttttttaaataaacttcaccaaaaatgcatcttactttcctactattctcttagaaaccctaatttccagcaaaaaacctaggatgacttaatttaacacaacatgactttaagattttcaattactggagagaattgtgagattacatttaccaaattaatcttaccaaagattactaaagtcatgtgagctgaaaggcctctgggctagcttctattagtctacaaacacttacttttctttaagccaactaattagagctctttcatatgattggtagtgaaatattgtttccatgtgacacataaacacacagacttaacagacacagacagaggcaaatcttagggatttaaaatgtttcacttgcctgttttcaaagtttttttcttccctactttataccactaatctcttgattatctattccatgtcttaaacaattgttaactaggtaactctaaatttacatctccaaatacatgacttaggtgaagcaaggtaaaaaatgtacatctcaaaggcacagacttggatctaaaaaaggcaaggtctgttatgtaaatgaagccattgtctcccccttagttaaagttcctagtggtttagacgcagagacagagatgtccttacaaaatggaaatttcctttaaagacataaatttcctttacacagaattttattgaagtgacttagtttgataggtagtattttcagcggagcttgattaggtcactggctttagggtggagccctctaaggaacagagccaagaaagcatgcacaattttctgatctaaatgtgcaatgagtggccccctgtagtaatgaccatttcctgtaaactgtcctcagccttccctaacgttgtagctctcatctgccatgacacacaccaaggtcaaatattctcacagtacagagtaatctctggtatctctaaaagtcaaagaagtcaagtaatgcaatacaggaaagcagaactttagacctaagaaaaacctgccatgactctgaaaactccacacagaaagcagaacacccccgcacagggtgagtggtgcctttattctgagttatttaaggatccaagtcattatgatacaggagtgagaaagaaattcaggcagataaggagggtaagagagtcctcagcaaggtttccttttaataaaaagcagcccccaatcatttctttcctaacaaaaagcagcctgaaaaatcaagctgcaagtatagataaacaagctaaaagcttacataggtaaatgctagcagctgtggtgatagaagagggatacctggaagccaagtctgttcaacatgaaggatcccccttcccttttcttggtcgccacctgtgtggtaaaaggcaggcaatatgacactggccaggtagagaccccatctggataataaaagattagggtgggtcggccagcttctttgtgcactatgcaaatggcatgcctagtctgaccaatctctcatgtcctatgtaaatcagatattgcctcctcaagctcgtctataaaacctcgtgcatttcaccaaggacctggaagacccactcagacgcccctctctctccgcaggtgagagagctatcctcttttctctttcctttgcctattaagcctctgatcttaaactcacttcttgtgtgtctgcatcctcaacttccctggtgtgagatgacaaacctcaggtatttaccccagacaacaacgccgcttcaattagaacccttctgtagacatttttttcacttggtaccaaagatggcaaaagggcttcccctttttgggagaaatagggtggaagaaaaataaaagaataattttttaagaaaggaagcacacagagaaatcaagtgaatgttttttttttctcttttgcagcttcaaggaattttagccaatccagagggcttgttacccatagtgtggaattctcattcagatttggccaagtcaggtagagatggtcaaatccaatgggagaaagaccaaaacgacaatgaaaccaaactatattgttagaaaaaaatgcttggtgctgcaaagaaaaccaggcagaaaatttctcagcaaggcacatttacttctgcagaagggtgctgcctgcatcagtcacaatcgcaagagcacaccaagctgggagggcaggggtttttacccctaatgcagttcctgtttctgtgtcctttccccattggctgatgcagttcctgtttctgtgtcctttccccattggctggagttggactgcacagtctaaactgacccgattggctagtgtttgaaattgaataaggccaattatgcgggaagggagaggctgttccttaccaactaggtgggaagagttgtttacagagtaagaggtttgcaggttacagattaagcagaaaaacaagtgctcattacagattaagcaggaagggctgtgtacagagcaagaaagaccaaagaagctttgaagaggaacttataatttctggcaatatgattactgagctctctaatggaagcagaaatgaagaccaggcggtggtcaatcttaacttttagtcatgagggagaattttcaagacaaaactccaattcagctacttacctagaaatggggcccaggctgaagactgctctctactgtctcagaaacaggaaaagtcccaaactcgccttccctgttggaatcgagctgaaactccagaaaaggagttgctcagcaaaagaaacctcagatctcaaccgaatgttgggagatcagggattctctggggtagaaggggatactcctggacttcagcaaatcggacttcagcaaattgtcctattaatttgagcaataaagatagcccaaactgatactgagcatcgataggagtgtctgcaaaaagaatcaaacttggtaaaatatttgaagggatttattctgagccaaatactagggaccatggcccatgacacagccctcaggagggcctgagaacatgtgcccaaggcggttggttttatacattttatacaagcttggttttatgcattttaaggaggcatgagacatcaatcaaatacatttaagaaatacattgttttggaccagaaaggtggacaaagcaggtgctttcaggttataggtaaatttaaacatcttctggttgacaattggttgagtttgtctaaagacctgggattatagaaaggaaatattcaggttaagataaaagattgtggagaccaaggttgttttagagtcttatagtggctgcccttagagacaatagatggcaaatgtttcctattcagatctttaaaaggtgctagacttttagttaatctctttaggattgggagggcctggaagaaaaagatctagctatattaattcagattatttagagatgcaaattttcccccacaaaggacaactttacagggccatttcaagatatggcaaagaaacatgttttgggggtcaaacattttgattttcgtccttgtcttacaatgttatgccagagacaggttggaaagtaagtcacaatatatagggtgaaataaaacccagctaatgacaatttatgatttgtatggcatgactccccaggtcccttagataggaatttgggcatgataaaaaatcagtttaaggagaatagcttgaacctgggaggcagaggttgcagtgagctgagatcgtgccaccgcactccaacctgggtgacagaacaagactcggtctcaaaaaaaaaaaaaaaaatcagagtttagtcctcaggagatttgtcaaaggaccacctccactcagagttccttctgttggtcacaatttgtaagtcaaaaagtatctgagacaggtcttaatcaattgagaagtttattttgccaatgttaaggaaaagaaaaccagaatcacagaaacagtctgtggtctgtgtctttctccaaagatgactttgagggcctcaatatttaaaagggagaagtgggctggtggggaaaagaaggagggtgtggtcatccacaggtggcaagagaaaaggaacatgtagggaaacagtcaatcatatatttgtcttgtgctcagtaatccacgcttttcataaggtcaggtgaacatggagcagctacctgtgaagatactcaaccttttatctgtagctttctgcttaggaacaaaaggagaggcagcttcttctatgactcagcttccagcttaattttttttcttttggatgggtgaattgaggtcccaagttttttattttcctttcacaaatcaattttttaaaaagaaagtaccatttaaaatagcaccaaaaatgaaatactagatgtacatttttactgaaacatgttcagaatttgcatgctgaaaactacaaaacaaacaaacaactctcaacattctttaggttcttatttgatagaaaagtgttctccatttttacttccaatgtcccattttttggtatctcttataaacaatatgttattgactttttgaaatgttgtctaagggtcattttctttaaactagaaagaataaccaaattacatttgctgtcattgctgttgtagaaaacttatttctgtccatttgctttgtatttccatttgctatacaatcagttctgttataatgtgacattcaccatgctctgcaaactagtgccaaaaaatcacatggctggtgggaaaaaataggggttaggatcacaatgttcaaaaatttcatcagtaacacataaaaaggaggaacctaatgaaaatggtaaggaatacgtaaatactacaatcaatatggcatttgaccttggaaagggctgaaagttgcctgtggataagggtagggtctgcagcctatgagttagtgtcaagtgctggaggtaggggcccctgaatggacaggtctggacaggtgtggctcagccaacccaggatgaaccacgcttttaaaatgtaaagagacaaagaacttaacagaaagtggaaaaaaagctacagacagtttacagacaagcaatgcaatgactctcaaacaggtgaaaagatgcttaacatcagccatagtaaaataaatgcaaactgaaactacaacaagagaacatttcatatgttagaaataagagctcagagtcacaaggaaaatgagcactggaacaaaggatttctcagcaaggcaaacttacttctgcagaagggtgctgcttgtgcttctggccactgcaagagcacactgaacaaaggagggaaagagtttttatccctaacgtggttagtctctgcttctgtgtcctgtctccattggctggagtcggactgcacaatctaaactgacctgatttgctactgtttaaaactgaatacggctaattaggcaggaagggagaggctgtctgttatggtacaaggcatgtttgggcatgtcagagtgcggcaaaggcaggcagggtagtttcggctggaagaactgttttggtgggaggggcagtttacagaatgggtagccaggagtaaaagaggactctttccaaataaggaagagatgtgagttacagattgggactggtgggagaagtttacagagcaagtagcttaggagaagggacaaggaagttgatcttgagaacaaggaagtcagaaattaaacctttgaagaggaacttactgtatctgacacacaccagcagattgccaagtgcgcaccgtgttcacagcatctgtgttgctggggacatagggaagcgcgcttccatccattgatggtgcagtagaaccagtcccacctctgtggaaagcaccttgacaatagctgcttaaattctaaatgggcagaagcttcaacctagtgagaactaacctctgaatttttatcctgcccaaattcctacctaagggatctggggagtcatgccctacagatcatggattctcatcagatgggttttatttgaccctgtatattgtgacttgcttttcaatctgactctggcataatatcatgagccaaggaaaaaaatatttaacctcaaaatatatttccttgccatgccttgaaattgccctgcaaaatctcttgtgggaaaaatccatatcatataaagaatctgcttccccctttgttttccttccttcctttccagatccaggagataatcaactaagagccaggctcccttttaggtcccataagaaacattttacaacctgctctctctctgaagtctgctacctgagagattcctctgcacaataaaacttggtccccacaatcctttgtcttgacctgaacatcctttccattaatcccaggtcttcagataacctcaaccaattttcaaccagaaaatgtttaaatttgcctatagcctggaaatccctgctatgagttgtcccacctttctgaaccaaaccaatgtatttcttaaatgtatttaattgacatctcatgccttcctaaaatatataaaaccaagctctaccccgaccaccttggggacatgttctcaggacctcctgagggctgtgtcataggccatggtcactcatatttggctcagaataaatctcttcaaatattttacagtttgactcttttcatccacaccagcaaatacatttctggggatcaagtcagtgtcagccagcatgtggtcgcagagcatgtcccaggattgttgtggtggcatttcttgtaacagcaaagacggaaccatcagaatgtctgtcaataagagactggttacataacttatggtatactcatataatggaatacagtgcagctgtaaataatgagttcaatttgaatgagatgtaatggaatgatcttcaaaatatactgagagagaaattcagagtgctgaagagtgtagcacatcaccacttgtatccaaaagagaactatagacaaaactctgtgtgtctctacatgcatagaagggttatgggataaaacccaagggctgttacagtgtgtgctcctggggtggaggaggaggagagccagggccagcaaagaagtagacttggtgtgcattgcagaaccctttgtactgttcagtgttttgtttttattttgagacaacatcttgctctgtcactgaggatggagtgcagtggtttgatcatggctcactgcaacctccacctcctggcctcaagagagcctcccacctcagcttcctgagcagctgggactacaggtgtgtgctaccacacccagctaatttttctattttagtagagacacagtttctccatgttgcctagtcttgaactcctgagcccaaacaatccacccacctttgcctctcaaagtgctgggattacaggcatgagcccccacacctggcagatgctttattttgatttttttttttttttttttttttaccaagtgtgctgggtagaatggtattccttaaaaacatatgcccaagtcctaacccctggtatctgtgaatgtgatcttatttggaaatcgggtctttgaggattatagttaaggtgtaaattaagatgaggtcacactgcagtagggtggcccttaatgcaacatgaagatgtcctaagaagaggaggaaagacacagatgcacacacacatacacagagagagagagagagagagagagagagagagagaaaatgccgtttgatgacagaggctgagaggagggacgcgtactcaagccaagggggccaagaacggccgcagcatcagatgctggagacagctcgattttggacttctagcctccagaattgtcagagaataaatttgtgttgttttaagctactcagtttaatttgttatggcagctatgcaaaactaacatgtacatatgctagtttttcttttttttttttttttgagacagggtcttgctctgttgccaggctggagtgtagtggcttgatctcagctcactgcaacctccacttcccgggttcaagcaattctcctgcctcagcctccttgagtagctaggactacaggcatgcaccaccacgcctggctaatttttgtatatttagtagagatgggtttttaccatgttggccaggatggtctccatctcttgaccttgtgatctgcccgcctcagcctcccaaagtgctgggattacaggcatgagctacggcgccaggcctccttttccaataagaaaaactattttattttcaaatgagaggggtgaaataaataaatgttcccattatgatcacgagtgaaggcagctgtctgaagatggtggaattgtgtacgattgtcatttcctttgtgtggcgaggcatctgactcataacacaaaaatgcgctatttctgtaatcaggaaaataagtacttcaaggacattctaagacagtataagaagggatttactctctgggagtgatcagatagaacctcaaagaggatgaaggaggagaaggatgctgcatttttcctctgttttatgaacgtaaacataggtcattcaaaatatctctccataagtaagaatcagtcattaggaagtaaggagacacaacaatggaaatgaaaagcaaaaggatatttagaaatatcctttaatctttctttctttcttttttttttgagatggattctcgctctgttgcccgggctggagtgcaatggcatgatcttggctcactgcaacctctgcctcctgggtttaagcgattctcctgttctcagcctcccaagtagctgggatacaggcacccaccaccatgcccggctaattttttgtatttttagtagagacaaggtttcaccatgttggccaggctggttttgaactcctgacctcagatgatctgcccaccttggcctcccaaaatgctgggattacaggcatgagccaccgcacccggcctaccctttaatttttcaaatgggacaaagtcttgtcctcataaccatgggaagaacctgtgggcagaggcatcactgtgacgcttgcatcatcaaaggtgcccagtgacgtcagcaccaacggaagactccagcgctaggagagcagtagatggcagctggtttgtgacacgacacagaccaaaagatatgcttagaagatccctgtccctgtggaacatctttggccatctctttgcatcactctaacccaaggtaaaggacttttaaagagggatctaggaaagtttggatgattgtggtaaaatcagggtttgggtcatcctctaaccttgacctcagaaagatattgacagacaggcagctcatcaacatacagctagtagcatgcccagggatgatgtcatggaggagggcacactgctgtagagaacctggctagatgggcctgtcttaccccatccacatggcatttctagtgatcttgaacttaaaaggtggtcagtttccaattgcagaggtacaagaactgggcccaaccgaagcctgcccaggaagggattatatgaagaactgccccatagaaatataatgtgagccacattttctttctttctctcctttttttctttttttttttagatggagtcttgctctgtcacccaggctggagtgcagtggtgcgatcttggctcactgcaacctccgcctcttgggttcaagcgattctgctgcctcagcctcctgagtagctgggattacaggcgtgagccaccacacctggctaatttttgtatttttagtagagacgggggtctcaccatgttggtcctgctggtcttgaactcctgacctcgtgatcctcccccttcgacctcccaaagtgctgggattacaggtgtgagccaccacgcccagcctgtgagccacattatcaatgtccggtttcctagtagccacattacaaacagtaagaagaaacaggtgaattaattttcataatttatttctcatttaactcattctttccagactatgacacccagactgttaccgtttcacctgtgatcgatgtgaagttatgagtgagatggtaaattattttctttcgcactgtgtttgactttgagaccccatgtgttttgtacacttgcagctcacctcatttcacagcagctgcatttcacacactcgggaccacatgtggcaagtggctactctatggctatcagtgcagagctaaagtgtcatgtttgttaaatgagtgttcaaaattgaaaatcactggaaggctgaggtgggcggatcacctgaggtcagcagtttgagaccagcctggccaacatgatgaaaccccgtctccactaaaaatacaaaaattagctggatgtggtggctgaggcaggagaactgtttgaacccaggaggcggaggttgcagtgagccaagattgtgccactgcactccagcctggcagacagaatgagactccatctcaaaaaaaaaaaaaaaaaaagtgaaaatcagagaatcagagacctgcattttgtgtggacacacagcgcagtggcgtgttccctatgggcttgtaaaccaaatcccacgtgaagcctccaacacaagctcaggcactggtgagagtccagacttccattgtaaagtctaatgcctttaatgtagacttcattctccgtttacaagatctacctttgagagcacttgtaaatttttagactggcatagtcttggaacaaattattcatcttactatcttagtgaggaagaaagaataaaaagtcgacttcgggggcagaatacattctcctagatcaagaagacttcctcatcaagacctcattctatttgcacagccctgcagtggagagatttattgcgtttctttcatgcaatcaacgcagactttgatgtgaacacggggagagacagtgcacgtgcagctgacccacggggaacagtcagccccgggcacttgaaggagaacagaggcttccctaactcaagtcgctgtctcctgccagctgaacattctagaagcaacctctaaggttggtgtccaatgcccatacattaacccattgttagatgatgacaaatatgtcattttttattgcttaaaatctaattttttctccttctttccctaggagagaatgaattctaaaagaatgctgttattggttttatttgctttttcactgatgttggttgagcgttatttcaggtaaatataaagtattgataaatcatgatctttagtgattggcagaggtggttttaatttaattaaattaattaatttaatttttgagacagggtcttactctgttgcccaggctggagtgcagtggtgccatattagctcactgcagccttgacctcccaggctcaagtgatcctcccacctcagcctcctgagtagctgggactacaggcacatgtcaccacaaacaactgatttttgaattttttttgtagagacttatgttgtccaggctggcagagataatctaaactgctgagttttgtccaaagatatcaatactactctctaaataaatcagaagttactttctctttgtgggacaaaggaaaatatacatattttaattatttcattgttaaacattcaacaattatttacagagtgccttctaggtgccaggctgtattctaggtgctggggatgcagtgataatgaaagtgcctgtcctcagggagctttcattctatttggagaaggtagacaataaatacacataaaagacaatgccagggatataatattttataaaacaagcataataaaaaataaaggtgacaatgccattttagatgaattataaactatctcaagtttccatctttgtgtttaatataaataatactaaaggttccatctttgtgtttaatgtaaacaagactaaagtcaacctaattctatgcatatagaagcatgtgtactagaggacgcatctgtaaacctgctggtatggtttggctctttccccacccaaatctcaacttgaattgtatctcccagaattcccacgtgttgtgggagggacccgggggaggtaattgaatcatgggggctggtctttcccatgctattctcatgatagtgaatacgtctcatgagatctgatgggtttatcaggggtttccacttttccgtctttctcattttctcttgccgctgccatggaagacatgccttttgcctcctgccatgattctgaggcctccccagccatgtggaactgtaagtccaattaaacctctttttcttcccagtcttgggtatgtctttatcagcagcgtgaaaacagactaatacacctgctaatattttcccgtctagaaaaactcaaattctagctttctccataccactcctcatggtcttcttcataagcaatgcagtgtttccagaggctatttgaacagcagtagtatcatgacagataatagtttttaaaaatgaaagctttgcacaacatgtatctggtaagggacttgtacccaaaatatgcaaagagctcttaaaattcaacaataaggaaacaaacacctaaatttaaaaattaaatattgacatttaaaacatttaaaaatgagcaaaagaactgaatagaatctcacaagagaagatatacagatgggaaataagcgaacgccaagatgctcagtctcatttgtcatcaggaaattgcaacgaaaacaaggagataccactacacacccattagaacggctaacacccaaaaatctaaaatctgaaaaccagcttctggtgaggaagtggaaggacaggaactctcattcattgctggtgggaatgcaaaatgttacaggtactgtggaagacagtgtagcagttccttagaaagctagatagagccttatcatgccacagagcaactgtgctcctaggcatgtagccaactgattaaaacacttatgtccacacaaaccctgcacaagatgtttatagaaactctattcataaatgcctcaaaccactaacatactagatgcccttcagcaggtggatgataaacaagctgtggttcatgaagtgctcaaaaccagaaacgaacaagacgactttcaataggagaaggataaacatgctgtggctcatctgtgcaacggaataacacccaacagtaaaaagaaatgagctggccgggcacggtggctcatgcctgtaatcccagcactttgggaagctgaggaaggtggatcacctgaggccgggagttcgagaccagcctgaccaacatggagaaaccccatctctactataaatacaaaattacctgggcatggtggtgcatgcctgtaatcccagctactcaggaggctgaggcagatgaatcacttgaacctgggaggcagaggttgcggtgagctgagatcacgccatcgcactccagcttgggcaacaagagtgaaactccatccccccaaaaaaaagaaaaaaaagaaatcagctatcaagctgttagaagacatggaggaaccctaaatgcatattgctgagtgcaaaaagcccatctgaaaaggctgcgtgctgtataattctcatgtgacattctggaaaaggcaaaactatattggcaggaaaaagatcagtggttgccatggggtggaggtgagggaggggatgaataggtgaagcacaaaggaattttggggggcagtgaaactgttctgtatgacagtgtaaccatggacacatgtaactttgcatttgaaaaaaaacccacaggacgttacagcacgaagagtgaaattaacatatgtaaatttaaaaaattagctaggaggttcgaggtatcctaggaagcaatgcagactgtgagaacataatctatatcccaaatgtacagaacaatcccactggaaggggtcagggaaaaagctgctgacctaaaataacttaggaatgagtggagttttttttgttttgttttgttttgagacagagtctcactctgtcaccctgactggagtgcagtagagcgatctcaactcaccacaacttctgcctccttggttcaagcgattctcctgcctcagcctccctagtagctgggactacaggcacatgccaccaggcatggctaattttttatttttagtagatatggggtttcaccatgttggccaggctggtctcaaactcctgacctcaggtgatccgcctgccacagcctcccaaaattctgggattacaggtgtgagccacagtgcccagctgggtatgagtggagtttgaaagtaaaggcaatagaaactgtacatgagcactgtacatgtatttgggtcaataaaggttttttcccacaggaatatgagttaacaattctgctgctgctatacatgtatatttgaatcaattaaataaatggatgaggcatgggggagcaagtttcttgctgttggagggaacttcatagttaagcaagagagggggccacagtgatccacgtgggaatggattgaagctggagacctcagcgtgaactcacgtttaccttactatgaacagagacatttacgtgtcaacgtgtttaaagatatgtggaaatacgcacaggttagtgtctatttccttgctctgttagctgagagggcctcggaggaaggacaccctggaagcaatgagcacacctggtacccagatcttggcttctagcaccattctccaggaaagcagcagatcgtggtttctagcaccattctccaggaaagcaacagatcttggtttctagcaccattctccaggaaagcaacagatcttgtttctagcaccattctccaggaaagcagcagaccttagtttctagcaccattctccaggaaagcaacagatcttggtttctggcaccattctccaggaaagcgaccaaggcttcttggagaagtggatggttctagattcggacaggagatttacaagatgagcccagagcatctcatagtgccaggagggatggaagggattttttttacaaattctatattgaagggagtatgtcacttaaatgggacatgggagctaactgggagagctcccgatggccaaagctgaagccttttgagcaagaaaagaaagtaacattgaattataacccaaagtatgaaacgaacttccacaagttcatactgatgtaaatgaatgattggaggagcaaaaagaaggaagaaaggaaggaagacaggttggctggatgttggaaggatagaaggaaggaagaagggagaagagacaaatctcccatatgcagaagaattccaaatcatgtctgtagattctccactaccaacgacacagaacctgacgccccagtcctgaagtttgggttgcgcgcagcgctttcttataaagaaaacggggagaaagagcagtctttgcgtggagaagcccgaaaacagaaccctagccaggtgaacaaggtcagcatcaataggaagtcatgatggggtctgagaggcggctgcagtcaagaggatcctgtgcagacaggaggctgagtggagtgtggcgtgctgggtgggatccagacaggaggctgagtggagtgtggcatgctgggtgggatcctgaaaaaaaaagagacattaggggaaaacaagaaaatccaaccaaagtatggactctcgttaacaatacagcatcagtgttgcttcatgaattggaacaaaagtaccctactaaagctagatgttaataataggaaaaactgggttggtgcaggggattccgcatactagctttagaacgtttttgtaaagctgaatcttctctaaaaataaagttgattgaaacaaaaaaggggaaataaagtaaaaataaatcatgccaaaaaaaaaaaaaaaaaaaaaaggaaaggaaaaacaaggccaggcatggtggcttacgcctgtaattccagcactttgggaggcagaggcgggcggatcacttgaggtcaggagttggagaccagctggctgacatggcaaaatcctgtctcttctaaaaacaccagaattagcagggtatggtggtgggcacctgtaatctcagctacttgggagtctgaggcaggagaatagcttgaatctgggaggcggaggttgcagtgagctgaaatcgcaccactgcactccagcctgggagacagagtgagactctgtctcaaaaagcaaaacaaaatgaccacccccactgctttggtgccatgtattttgtgtcatttgtcctcctggaggattgtaccttaatgaaaaggatgcatggccagttataaagagtttcagatgctctgtttgaggataatgatggagtaatcttcagcagaaaggggacagggacccatacgctaatccatggcacggattctaccatctaccccggaaccacagccaggggcctggcatgtaggaggtgctcactcattatttggtaagaaatgcataaataaatggatcttgattctagatattttgttgttgaaattgcaatgggtctttgttcaaatttaaaacttgaatgatttttttttcatttatttaaagaataaggagttattcactggttgggttgatccatttaggaaataaacatacaggatgctcagtaacatttgaatttcagggaaacagtgaatcttttttagcagaagtatgtcctatgcaatagttacactaaaaatttattcattgcttatcttaaactgaagagatgtcctgtgttttgtctagcaaactcctctatagaaaaggaatctcaggccaggtgtggtagctcatacctgtagtcccagcactttgggaggccgaggtgggcagatcacctgaagtcaggagtttgagaccagcctggccccgtgtctactaaaatacaaaaataaaaaatattaaaaaaacattagccaggcgtggcagtgggcacctgtaatctgggctactcaggaggctgaagcaggagaattgcttaaacccgggaggtggaggttgcagtgagttgagatcataccactgcactccagcctgggagacagagcaagactgcctctcaaaataaagataaaaataaaaataaaagtagaaaagtcatctcagccggcgagaatatttgttgtctaaatattccacaaactgcaaagcaaggctggagggggtcaactgggtactaatggcaagagaggcaggggaaacggcaaaccaaagacagctctaatccctgaagacaccactgtctgcgtatgtgtaggctgatttgtatgtaatgcacgtgtatgtgtgcttgcgtgtgtgcgtgcacgtgtgtgtggtgagcttgaggatttgggggttgattacagaaaggacaggacaggccgtgcgtggtggctcacacctgtaatcccagcactctgggaggctgaggcaggtggatcatttgagatcaggagttggagaccatcctggccaacattgtgaaaccacatctctactaaaaacacaaaaaatagctgggtgtggtggcgtgtgcctgtaatcccagctactgggggtgctgaggcaggagaatcacttgaacccaagaggtggaggttgcggtgagctgagattgcgccactgcactccagactgggctacagagcaagactctgtctcgaaaaaaaaaaaaaaaaaatctctgtcgagggtgatttttttctttaggttacaataaccctcttcagccaaggatgttctctgctctggtcattctgcagggccccagaaattaataagaccagcacggtcaaagaatggggactttttattaagttcccccttttcgtttcatgtttttgatgaagtctggcatggacagtttggattttgatgaatctacgcctggggaatccaatcatggaatgtctgtggctaaggatactcatgataatgccagaaagggggacggacagtcttgaagtcatttctttcacttaaaaatatcccagggttactatcctaggcaacgcagggagaccctgtctctacaaataatttaaaagttagccgggtgtgatggcacacccctgtggtcccagctacctgggaggctgaggtgggaggattgcttgagctcaggaggttgagactgcagtgaattgtgatgatgccactgcactccagcctgggcagcagagtgagagcctgtctcaaaaaaaaaaaaattgctcccagggttatgaaacagaggttgcctaataagcttgctaatttaataattagcttaaaagcacaattacactctagaagaacgcagtgttgaaatgcaaagggaggtagcttgtgcctgtggtcccagatactttggaggttgaggtgggaggatggcttgagctcaggggtttgaggctgcagtgagctatgatcatgcaagtgagaacgcatctcttaaaataaataaataaaataaatgcaaacagaatcaaagatgaacttctggatgcctcctccccacctctttacaacatagagcagaaccactaatgtttggtaaataaattaattgaatctatgtttttgtctgaatatacattctcttagctgatctgttcatctccttttattaaaaaaatcttcctcccaacactcatactctttcctgatattctgcttttggccatgacctcctttccctacatctctttcctagactagctcatacccttccccacccagctgagatatctcttctctgggaggcttcccctgactctgatttgggttgatgcatgttgacgaaacaccaaacggggcctgcctatcacaggctcaataaacattgaacaggctccttgcaatcacttgattttctctttgtatccaggaatcaccaagtagaagaacttcggctctcagactggtttcatcctaggtaagaacaaaaatgcctgtttacatgcacacacaaacaatatacttcaattggaagtaacaggtttttcttccccagtcaccaaattcagctctcctgggacgtttccagaattggagttttattttcgaggctcttataaacaaaccagggtctgttgatcaagaaccaggcgatgattgtggtcatgaagaagcagacgctctctacctggcttagctttcctggtttatgcagtgcgagaaagtctcttcggaaccagcttgaatatgccactgatgacgctgcttgactttggtggcagcactcaggggcagcctcatcctttgtaaagtgtatgtggtttcaactttgtgttgtgttcctatgtagctttggggttatttacagtttgggggctattgcaggcaaagttctggtgactaaatgtaacccgtcttttttttttttacacagatatatgacttccggtgtgagacacatttctaaaatgaagttattaggccaaagaatgcagacatttaaaatttttgatgtaaattttaaattgctaaatttacttttaataatggtaccattttatcttcttgtctacagtgcataaactaaagtattaccagctttttcatgtttggcaaagctgctagttaaggcatctcaattcaatttgcatgtctgtaattgtttaagtatcttttttttttttttgtagagacagagttttgctcttgttgcccaggctggagtgcaatggtgtgatcttagttcactgcaacctctgcctcctgggtcaagtgattctcctgcctcagcctcccgtgtagctgggattacaggtgcctgccagcacacctggctaatttttgtatttttagtagagacagggtttcatcatgttggccaggctggtcttgaactcctgaccacaggtgatccacctgcctcggcctcccgagtatctttttatatgtttactattcattcatatttcatcttttgtgtagtcttctttttttttttttttctgagacagagtctcactctgttgcccaggctggggtgcatggcgtgatctcggctcactgcaagctctgcctgctgggttcacacgattctcctgcctcagcctcccaagtagctgggactacaggcgcctgccaccacgcctggctaatttttttgtatttttagtagagacagggtttcaccgtattagccaggatggtctcgatctcctgacctcgtgatccaccctccttagcctcccaaagtgctgggattacaggtgtgagccaccacgcctggccaaaattacatgacatatagaaaataaaatgtcgagttttattacattttgtaaatgggtaaaactctccaattaaaaaaggcagagattgttagaatgtataaaaacatatttatatgccgtctacaagagacattttagattcaaagatgcaaattggtttaactaaaagaattgaaaagtgtataccatacaaacagcaaccaaaagagacccaaagtggctctatacaaatatcagacaaaatagacaaagacaaaaattgttactagagaaaaaaaatggggcattttataatgacaaaaggatcaatccatcaataagatacatcaaatatataaacatttgcatctaataacagtcctaaaacatatgaagcaaaaactgacagaattgaagggagaaattgacaattcaacaagaatagctggagacttcagtacttcactttcaataagagacagaacaactaatcaacaagcaaatagaaggcttaaaaatactacaaacgaggcctcacaaacatctatagaaccacctaacaagagaagaatactctcaagtgcacatgagacattctccaggataagccatatgttgcacaataaaatctcagtaaattcaaatgattgaaatcatacaaagtatgttatttgatcatttttttctaaattctaaaattaaaaatcaataacagaaagtaatttgggtaatttgtagatgtgtggaaatttaacagttcactcctaaataatcaaaaaagaatcacaagggaaattaaaaaattttaaggtgattgaaaataaaaacactacatgccaaacttatgggatgcagcaaaaacagtgcttactgagaaatttatagctataaatgcctacattaaaatgaaagatctcaagtcaataacgtcctaatttttgaatttttttgtagagatgaggtcttgctgtgttgaccaggctggtcttaaactttatacactaaggaaaatttatacattaagaaaatcagaaaagaagaacaaaataaaactaaagcaagcacaggaaaaaaagaagagcaaatcaattaaatagaaaatagaagaataatagagaaaatgaacaaaaccaaaattggttttttgaaaagataaacaaatttgccaaaagtgtaacttgattgtcctagctaaaaagggagaactgaaattactagaatcaggagtgaaagaggggacatgaccaccaacttccagaaataataaggattataagtgaatactgtgattaattgtatgccaacaaattaaataacctatatgaaatgaagaaattcctagaaagactaaagaagaaagggaaaatttgaatagagctataataagtaaatacattgaattagtaataaaaaactttctacaaagaaaagcctagaaatacaaaatgtcattggtaaactatgtcaaatgctaaagaagaattaatatcaatctttcacaaactcttcaaagtattaaaagaggagtgtttttcaactcattctagaccagtattaccctgatatcaaaaccagacaaaggtatcacaagaaaactacagaccaatatcccatatgaatataaatgcagaacttttcagcaaaatactattatagaaaactgaatccagcaacatataaaaaaggattatacaccataaactacatagtgggatttattccaggaatgcaaggttggttcaatgtatgaaaatcaattaatgtaatacactgtattaatagaatacagaatataaaaacctcaggatcatctcaatagatgcagaaaaagcgtttgacaaaattcgacacttaaaaaaatataaatacccaacaaactagaaatggaagggaacttcctcaacctgatgagtcaaaagtacaacaacaataaaaaataggtaaagtggacttcatcaaaactaaaaactttcatgaatcaaaggacattatcaagaaaatgaaaagacaacccacagaatgggaaaaacatttgcaattcatatatctgataagggcctaatatccagaatatataaataattcttatcattaaacaacaaaatgacaaatagtaatttaaaatgggcaaaggatctgaatagccatttctccaaagaagatatactaatggccaataagcacatgaaaagatgcccaactttattagtcttcagggaaatgcaaattaaggtcacaatgagatagcacttcactctctatgatgtataaagatgtataaagtaggatggctggaataaaaaagataacaaaaaagtgttggtgaggatgtggagaaatttgaaatttcatatacttttggtgggaatgtaaaatggtgcagcctttatggaagacagtttgtcagttcctcaaaaagttaaccatagaattaccatatgacccaacaattctacctctagatatatatccaagagaattaaaaacctatcttcacacaaaaactcacatatgaattttaatagtagtatttgtaatagccagaaagtgtaaataactcaaatgttcatcaactaatgaacatataaacaaaatgtggtctagccatccaatggaatattattcagccatatttccagaacaggcaaatctacagagacagaaagtagatgagttgttgcagggattgcagggagaagggaatggggagtgactgcttttgggtagtgatatatcaaagtatttcattttctttggagaaactgtaaatagcatgtgttttaaatattactttctgcatgttcattgttcatagtaatgagattaatttttaatgtgctgatcttgtatcctgaaactttgctgagttcacttgttagttctaggagatattggtttttttttaagattccttaggattttctatgtagacaattatgtaatctgcaaatagggacggtgttgtttttttccttcccaatctgctggcttttatttcattttcttgccttattgcagtggctagaactgccatcactatgttggtactgccacgttcctcattgtagggagaaagcattcagtctttcactatgaagtgtgtgcactgtaggatatttgtagatgttctttgtcaagttgaggggattcccctctattactttttttctgggagcttttatcatgaatggacattgaactttgtagggtgctttttccgagttgagcatgtgattgatcttctctagctttcaatatggtggtttacattcattgattttcagatgttgaatagcctatcttaaatcctgctgttgttttgttgtattgaaggcaaatcggatggctcgctccggttttggactcatctctcatttctgctggattgcactggtgggcctaaagcatgagggagaagctgaaaaaaagggcatccccagaaacttgtaggaaaaggggagagagaaaaagaaagcagagaaggagggaaaaataaaggcattgtgtaagggaggtgatctcctgcctcccatcctggcttcagcgaatgattggagagtgttctgactcccggctgcctaattttgagctgtagtcagagcttggaaaaggcagctcctgggctcaaaggcagtggctgggggaggaacgcacaaacccaggagccaggtaggctggatgtggcatccccacgtgttaactgcagtgtcaggcaacttactcaaccgtgtgtgcctctgcttccccacgtggagatcaggggtggtggcactcattgcatagggcgttgcaaggatgaatccagtgggatgatgcactcaaacacggagctgggcgcgcactaggtgctctctaagcattaggcattactgctcggcacctgctgccggcgcctcagtaaagcactccctgtttaacttggttcttgttccacagaaaacgccctgatgttataacgaaaacagactggctcgctcctgtcctatgggaagggactttcgacaggcgggtcctggaaaaacattacagaaggcggaatatcactgtgggcctggccgtctttgctactggcaggtaggtgccactcacctttgcccttttttattttgggaaaatgtggatcagcattcacgagcctttaacctccaaagagccaaccataattaagcataattagtgataacaatagccacgatttctggggagaaacaaacttacctgtccaaacccaaataagggactcaaagacctggagaacagtgaaagtgagacttttagtgacagtcttgcaagatcggatgtctgatgggcaggcacacccagcacagtttcaactgcaatttatcccctagtgcacaggtccctccctcagttcctcataggctgagtacttggggtcacaatcttcccagacgtcgcctatttgttgttgggcaggggctttaggtgttttctttagggtggtcttgctgcattttgttgcagcccacaatgcattgcaatcctagtgagctcaggggctcttcaagtatctgacttatgacctaagtagctgagcaggctgataagaacagacaaagtgagctattttgcagactagtaaagttttatcttagactaaacttttttggtttgggtgagggcaactaaggcaggaggccgacaagcaggcattggctatttaagtggggacctagtatatcctgtttcttttgtagtttgctgacctgagccgatttaaggccctttgtcttggagatggtctactatagacacgatttccttcaatttctggctgtcctgtacaaaaggtgtgctgggtttctctgtcgatggccgagtccttaacaccagtgggaaccttttgactcatacccatttagctcctgctccctttcttcacaacagccattccaaaacatggtggcttttctcaggccctccaggtcaggacattccttcccactcaccaactcagctgaagctgtgggcccgactcctccacgcttgtacatcccgagttccttagcatcagacacacccatgtgagtgcattcagccgcctcttctcctgatcatgtttagaaaagtaagtgtcggccgggcacagtggcttatgcctgtaatcccagcactttaggacgccgaggtgggtgggatcacctgaggtcaggagttcgagaccagcctggccaacatggtgaaataccatctctactgaaaatacaaaaaaaaaaaaaaaaaaattacctgggcgtggtggcaggtgcctgtagtcccagctacttgggaggctgaggcaggagaattgcttggacccaggaggtggaggttgcagtgagccgagatcacgccactgcactccagcctgggcatcagagggagactccatctcaaaaaaaaaaaaaaaaaaaaaaagaaagaaaagaaaaaagagaaaagtaagtttcttccccactgtgtgtttcctaggtttgcagaggagtacctgaggccgttcctacactccgcaaataagcacttcatgacaggctaccgagtgatcttctacatcatggtggacgccttcttcaagctgcctgacatagagcccagtcctcttcgaacgttcaaagcatttaaagtgggcaccgagaggtggtggctcgatggccccctggtgcatgtgaagagcctgggtgaacacatcgccagtcacatccaggacgaggtggacttcctcttcagcatggctgccaaccaggtcttccagaatgagttcggggtggagaccctgggcccgttggtggcccagctccacgcctggtggtatttcagaaacaccaagaacttcccttatgagaggaggccgacctcagcagcttgcatcccgtttggacagggagatttctattatggcaacttgatggttggtggcacaccccataatattttagacttcatcaaagaatatctgaacggagttattcatgacatcaaaaatggactcaatagcacttatgaaaagcaccttaacaaatatttttacctcaataaacccacctagctgttatcaccagcatacagctgggatcttgcattttctcctcctccacagatccaatacgtcaaggtcgcacatgattcccagaggaaattatgaattacgccatgaggtttatgacgaataaatgaatcacggcaatttcttataaatgagggaagtcttaagaccttccattttttagagacatacaaatttacatccttcccaaataaatgtttcttcttgccattttgagccatcttatttggctaatgtaggataaagaataaaaggataattacttaatgttaatacacagtaatgttattatctatgtattgtagacaatgtgaaaatacatttgacatagaatgaatatttttaatggagaaagactctagttgagaaaaaacattcataaaatggaaaagtagttcacgcaaaggaaaaaataaatgccaggccactcactgagtagtcactgtgtttttccacactgggatatgtgtggcttgtggtcgacctcgcctattgtctcagtctgttcggtgtgtgattcgacacaggtgagctagaggaatccagccaaagccacgtcttactattacggtttcaaagtgagatattcagttccttttgttaaaaagctatagatattggccggttgtggtagctcatgcctgtaatcccagcactttgggaggccgaggcaggcggatcacctgaggtcaggagttcgagaccagccagccttgctgacatggtgaaaccccatctctactaaaaatacaaaaaattagctgggtgtggtgacggatgcctgtaatcccagctactcaggaggctgagacaggagaatcgcttgaacctgggaggcggaggttgtagtgagccgagattgagccattgcactccagcctgggtggcaagagtgaaactccatctcaaaaaaaaaaaatctgtaggtattttatttttttaaaaaagatatttactgagctcagcggtaaaggtgctctgccagatgcagacagggatagaaaagagtttggaacacctgtgtccctggcagcccacactctggcagaggttgagtctgtgtgctaggagtgcgtgttcagggtgctaaaagtgacaaggaagacggtcacctgagctctgtggtggtcagggagccatcatctccaccagacgctttgtgtgtcacacagggagagtgttcctaagtccgtgggcagtggcagctatcaacagctttagtaagtgtcacggcccaccccattactatgctgaggtcctaactccgtacctcagaatgtgactgtgtctggagatagggccgttaaagaggtcattagggtaaaatgaggtcactgaggtgggccctaatcccacaggactggtgtccttattaagagctgaggacacagacacacagagggatgactgtgaggacacagggagaagaggtgtctgcaagctgaggattgaggcctcagggggagccaaccctgtaacaccttgatctggaacttgcagcctccaggactctgatgacacacgttgctgttgttggtgctgcccagcccagtcagtcgtactcttttacggtggcctgagcaaactattccagtaggtgtcccaaaaataacagcagttcaaacaccagattgcaaggagggctgaccaccgtttcctgggatggaagacggaggctgagaaaagcctccctgggttcagaattagacctggggctaccacctcagggtcccctttgtcatgtctcccagcctccccctcatgcccagttcatgccagggaccatcttaaagaacctatctgtcaaggcttagctcaccctccctcttttttgctgtcatctcctttgactaaaagaaggtgatcttttcggagactcattcttgcatctcacagagtagctctcagttttaaaaaaaatctatgaaagtttcaaaaggatgaaaatagatcttacattagccacaagccctatatatacagtattagtaattacctgggccagatctggaaagggtgggggtatactgaactaaacaaaacttttttttttcctgccaatttatggataaggctagaagacttactgagaaggcttctgaagttttatctttaaaaattacggaatcaatattaaagcattgtaaatgtcttgatttgcatggcagaacaacaggtaagcttgccaatgttgagaacttccaggtcccaaggcaagcctgcttaggagacttagaaaccaggtcatccggaaaagccaacatctgtccccaccagccagcgtgtgcctccctcatggtgggtgctaaattgatttctaaaagaagtttaattttgccaatttgatgagcaaaaataacctctctttttttttatttgactacttatgaagtcaaaccttcttttaatcagccttttgatctatgcaaatatccttttttttctatcttttgctcagtgctttttttttcttttagagacaggatctcactctgttgcccaagttggagtgcagcggtgtgataccatggctcactgcagcctcaaagtcctgagctcgagggatctgccagccttagcttcccaagtagctgcgtctataggcgcatatcacaatacccagctaatttttttttcttttttctttttattttctttttgtctggggctgctttttgttaaggttttttttttttggtttttttttttgtagagacagggtcttgctatgttgcccagactggtctcaagctatcatttggcccccagctttccacagcgatgggattacaggcatgagctgccatgcccagcccttcaaggagttttgatttacatatgtatttacatatgtgatatgaacccttcatcacatttgctgcaaatgttaatttcagattgttctttccattttgattgtgttgatgatgattttgacgagccgagtttaaagctctcatcctttcccgtggtgttgatactgtctgtgtaggcaccccatcctcaagttatagaaaatatagaagtttcaaggtttccttttattcagacttgatcaggaatgaattttaaggtaatgtgtagggtgagatagctaatcttatttccccctttctgtcttgcccatttccctcaacactagttattgaataaataatgcttttttaggacaggccatttgtactgtctatgaagttgttgtatatattcgggttcattccttgacttgatacccagtttcattgctgttgttctgccccgagctaatgtcacatgcttctcatcattgctgttttatattagggtagaatggtagatccatctgcatgacgcttcttttaaaaatgtttccaaacttttgttccttcatgtaaattttagattcagatctgcagtttggggaaaaatcccactggaagagtaattgaattgctgaagtctatgggtgaagctgaggttatcaactctacgatgttgagagagacacagcactctcacgtcgctatttatcccggtcattttagggccccagaaaaggctattttttatggtcttacaaattccataaacctcttgttaaacgtgtgctttgtgattgtcgtttttccttgtgtttttccagctgggcttgttggtttgcaggagacccgtggggcttcgtcaccagcttcatcaccagctctgggtttcgttccattgtgtttttcccacgtgggggagaagggagagaagggggagaagggggagactgggcagacgggggagacgggggagaagagggagtagggggagaagggtgagaagggggagatgggggagacgggagagacgggggagatgggggagaagggggagtagggggaaaagggggagaagggggagacgggggagacgggggagtagggggagaagggggagtagagggggaagggggagaagggggagaaggagtagggggagaagggggagtagggggagatgggggagactgggcagacaggggagacgggggagaagggggagtagggggagaagggggagataggggagaagagggagatgggggagtagggggagtaggggaagaagggggagaaggggatactgggcagatgggggagaagggggagaaggggagtagggggagaagggggagatgggggagacaggggagaagggggagacgggggagattggggagaagggggagaagggggagaagggggagaaggcctcactggaggcgttttcggggcagcctctggacatacctgtcttgggagttccagacgacaagtattgagtccctgacccaatttcctcagagcctgccctgccgatgggcagccctggctcaccgggtgcagaagtgggcgccgcccttcagaatcctgggctccgaggagtgggcgttggctggtctcacctgccacacaggtacagctgtctgtgtttacctggcagccccgctgggcttctgcagagagcagggtctggagctgggctcacttagggctcttggacctcagtggggacatatgcgtttgctcacggagcatggaggccacctctctggagggtccccagcagacccaggtgaggtgggtcacagtggaggggagctggagtctgagaacagcctccgtggggtcatgttcctgaaggacacttgagggccaccccagcagccctggggaggggggtgcatcggaggcacctgggactacagtgctccactcattgtataagttttggaggcctctggcgctgcgggcaggagctcagggggccatgtgccccctcctcaccaccctgggtgtgctccaggcccacaggccaggctggggcacactgctggcccttggctgttggttggcaggtggttggcaggacctggagacgcacagagggaagaggccttcccagcaggggaggggaccaggagagaggcagggttgggctcagctggggagcttccttgagtccctgagatgcaaaagggcttccagggggacctggggacagtccaggccacaagccaaggtgaaggaggtggaagggaggctgagggcagcagaggggtgaggggcccaggcaggaagactccagaaccgccagacctaggctcagggtgggggacatgggcctgtggagcagaaaagaaaaaggtggtgattctgaggacttcactcattcattttgaaatcaatcaatcagtaaatcaatcacatagcacaaaacagccatccctcactggcatcactgggccttctgcctccccatgttggctgtgtcctgccagggccctgtgctctgtggaaacccactccccttgggggcccacaaggccccacccactgcccctctcagccttggatctcatccctgccctcctctgcttggctcctgttccagctgcatgacccatcttccagggagccttcctccctcacctcatctcagggccacccaccctggcggcccgtgctcacacagcacggtcatgctcctcaaaccttgctctagcccccactcccacccccatagcacttgcctctaacaaatcaggtaatgacaatgcttgctgcaatgtaacctgcactagggctggatgatgtgtctgtcttgttctaagtgaatcccaaactcccagaacaggcctggcccgtgtgcttgttgattgactgaatgatgcgttgggaggcagcagaggggagaggctggctgggcacttggctcaggaggctggagatctggatcccttccagctcctcctcctggctgtgcaacttggccttgttaccgaacgtctctgagccacatctgtagagtggagacggcattggacccatatcactgtgtcatgtggggctggtaagatccggcagcccctgaagcagccggcacaggcctggccgtaaggggagtgcggatgggctacaccctcagtggtgctggctgggaagacgaggccccagaccctcaggccctcttcccgtccggctccaggatgtggctgggggacagtgctcaccatctatgttgaagaccggggctttctgcaggtggaatttctccacgtactccaagtatcttcccagccatttggggtcctccagcattcttctcgctggaatcagaggggctgacagtgaggggctgaggcctggagcctctgtcttttctgtcctcctcctcctctgcggagaacaacggggaggcagaggccctgggcatcggccaccccaccactaagttgccacgacacagtctgggggctcttcggaccacggcagcaccccctctgcgacctcccaggcccggccagctctgattgcaccggccccaaccttgcctcctctaaacacaggtctgttctgagcacggcaggtaaaatgcccctggaaggaggaagtcaggcctggcctgcctcagtggagacccccagagagtcccaagttccggcctggtgccacccctcccaacccctcaaccttcttggccctggggcctctcggctgctgctgccccgctcccccaccccatcctgggctcgggctccggctgatcctctgccctgaaatgcccccagccccatctatctccacctcgtcttcaggacactgcagcccctcgatgtcccccactcagtcccctgtgcccttcgagcccttctctcatggtgcttttactttcaggagccccccaggaccccgagacattgcttgataaggaggaagacaaggaaggtgttttctcagttttatccactgataattcaagctcccagtgcagcgcccagagcaatgcccgccttgtagcaggcccgcagtgcacgtcctgcatggggacaccctccctgaggggcatgtgtcggaggaagagctcagctgcgtctcggcccaaggctgcctgtgccctcagaacaccctgcacagaaggccccctcccagacaggacagcaagtctctgcacagagccgggagtgtccagcagctccgccctcatgtctggggtctgaggcactgcacctgccagtgctggggagagctggccacttacccagcagcacccacaggttggtgatctcatcatcctcaaagcgcacgtaaagaatgaggttgctgtagtcggtgctgacgaagcatacgtgcatgctgccgccctcgactgttggagaccccgggccagctgatgcacgatgcctctctcctccgtcccccaggccctggacccccccatgccctgtggacattgcaatgccaccaagaggatgcacagcttccttccagcacccggtcttcccccaaagccgacaaccccttctgagtgttgcggccgggactggacatccgagcgccccttgctcgcccctccccactcagagcccagcccagatcccggacaggggcactcacatgagccttggtactggccttgcaactgggttggatggacggtgatgtttgtttctttacacaccccttctcccctgggaaaagagaaaggaaccagggcctggtcagcctccaactgtgtcctgttgccctttcccaggacgtggtggccctctcagggctctccaccaggggacactgtggctgccaccagctgagagccctcctgtcctccccggggcgtcagctccccagactcaagggcagcctcgtcctggcacaggcaccagggtcatgcagccaggaggtggcgatgcccagggggtgctggggatgggactggagtgacgaagtggagtcttcctcacttctgggatgacaccaagcctcctggaacagatgggtcccagtctggctttggctctgagctccaggttttggggactgggactctgactgtcctgcctgtccccacttgctctggctctgtgcatagacagaggcccctcgcccccatgctcctgcctccgtgcatagacagagcccccctcactcccatgccccttgctccggggtcttcagtttctcatttggggtgggtgcccaccaacccctgggactctgcaggccaccgtgcggtgtgtctacgactgagcgtctgctaggatgtgggtctaactgccttcggagctgtgggtgcaggcggaataacggaagcttgttgtcggtgtcactgcgctcagcgtagcttgtccccagggccgattttcttttgctgacagtgcagccgtcctcgggattccctggcttacatcggggccggaaggggtgtgggcccagggtggctgtggtccttgggagagggatgttgggaatgaggcaactttcaaacactggagatcgcacatttaaaactccagacccgggcttccttcacagctggaacacaggcccgtggcccagtgggcgtgtctgctgggactggacgttgcctccggggccgggctgtgtgtttcctgcccacctgcctctggcagcttctgagcttacccctcttggagcggggtcttgggcctcagcttggtgtgatgtgttcctctggctctgaacactgtcactgttgcttgggggtccctaggtctgagaatgagcgcctgagaggggcggcaggagccgtgcttacttccagaacagcacgaagtccacgtccccgccgtccctggtccggatggagtggagagcgagcctcagggggtcggccggggagaccaggtctgcgtggttggctgccagctgcagggtgagccagcgcccctccacctgcaggggtgtgggccggggcagaggaggccagctagcgcccggctgtgtggcactccctccacatgcaggggtgtgggccgggtcgggagaggccggctagtgcccggctgtgtggcaccccctccacctgcaggggcgtgggccgggacaggagaggctggctagtgcccggctgtgtagccccagcaggccaccctctgggctctcaggccccaggttcggcactgagcatggtcagcaggtggtcgtgcccctcccagggggctgcactggcaaacgttcccccttcctggtctctattggcaaatgcccatctgtgggtccaggtggaggataagctgtgcttacttcttgggaagagtcacctcccgtccccttgtctcaggtctctgtccagtccccttccccacttgctgcccccacttccctcagccctgcacccctgcctctgcctggtccaagctctgttcccctggtcagggagggcagaggggagggtctggtgctgtgccgggtgtccctccatccctgcactcccaccagcagcaccaggaccccaggggccacacagggaggaggagctgggaccctccctgtatccagggttggcctcttcgtgtcacccagggtgaacccctcccctgctcggctgggtcccctgggaccctgctccctgcctgggcccagtgtctgggcgctctgtttctccggctgccgccctgcagccttctcctgcgacctgctgttgtgctgtagcttccgcagcccggagagagggaaaggccccgaggttaatcagtggccgctggtgctggctgcgcgggaggacagagcccgctcccgcctgggttggacccaggtgcagctcaccctccagagctgctgcagggtcaggcaggatctgaaccccggcacccccctgtctgccccaccccctgcacctcctcaatgtgacactcaagccgttgttccaggcctgagtctggggactggacccatgacacgtaccttctgcgcattgaagcccggctgtaccggtacctcttccagagccttctgggcacccgccaggcccaggccaagggccagcagcaggagcgggcctttctccagggccatggctccggggaagggggagcgtccctagccagctccctcctctgcgctgcccggacccacctgccacctaaaagttccgcaatcccaccccaggaatgacaccgcctctgggcaccgccccatgtctaaagtgatgcgaagctgttgtttggactgggtgtggagtggctgtcggggcagtttaactgcattgcacgtctgtcctggattctgggatgaggcctgtgcctgaggggggctgagaagagggcagaggaggacgtgggctcattcgggcctgcagtccctcctccccaggccccctgacccccagtgtgtttgtccaccggctgctggagccacgaatgccaggatcactctcacatctctgttcacctcatgctcacggtggggcctgcccgggtgtggggagggtggagggggtgacacagaccagctctgggatggcactcggcacacgccaggcactcgtcacggggcgtctgtcccttgttcctgcttactgcaaacgtctcccaccagccccctctctccaaccctggagccactcccaggccacgccatgagcctctctcctgccccatcctcctgcccctgtgtgtgcataggccagcgtggggtcgggtcaggtgctccctgcttgctcgtctttgggtcctcctttgccatctggattaagtgcagatctccaggccacaaagcccctgtggtctaccccttccccactccctccctccctgctgcagccgcacagagatgcctgccagcccttgaatgtggcacctgcctctgtaccccgcccccgccctgccctccttcctcctgcctggggctgcatggggccaaggagaggctgcctgactgctgcaggtcccagcttccagggagtctggagtctggtgtggggagtacagctggcctcagggtgaccactcgcttggcctcagggttcttagatggacactgaggggctactctgggctggtgctgcacgagtgatgccccgccagccccctccaaccatggaatgtggccagtcccaagttccacccactgagcttctgttttatctccaaagatagagagcgggcagggatgccatggtctgtgcagggtgctccgaggacggagtcaggtaataaaggaaagagcttagttgagtgcctgctccccataagctcgctgtgaagtcagctcccagccagaggtcctggctgagggtccggttaggtttacaggaaatgcacccagcccatcagggaggctccgaagccctggctagggagggcctggcctgatctgtggggtctttctggaggcttccatcagcaggccagggtgaggcagctctcccaggtcagccttggtaatggccaggctagaagatgaagtctcattccccacccctggccacaggcacagggactcaggtgggcctgaggagacctcaggcccatcccctatgtcctggaagacacagcagctgccgcccatggctgactcagtctgagctcccacacaccctccagcgctgagctggccatgcttgagtcaaggggccggggaccgatacagcatcctgcatcctgcctacaccccctggggccctggggaggccccaccctgcactggctcagctccgcatgcaggttccagaagtggccatggctgggcagggctcagcgcagcgcgacagcttctggcctccatccctcttcctccttctgggtgcaggatgtcactcaacagcagccacagtcaacctcaagtctgcctgtttgcttgggccttagggggtcctagcgctccctgtggaccttccagggcccagctgctgccctgggtctgtgatttctgcctctgggcaccttcccctacttcccaacctccctggtgtctgggtgctggcctgagatctgtgtgcagggatgagtgcaggtacgtgtgagtgtgtaagtgtatgtgtgtacaggggtatgtgaagcgagtgcaggggtgtgtgtgcagatgtgtgtgagtgcaggggtgtgtgtgagtgcaggggtgtgtgtgtgagtgcaggggtgtgtgtgagtgtaggggtgtgtgtgtgagtgcaggggtgtgtatgcaagtgtgtgagtgcaggggtgtgtgtatgcaggtgtgtgtgagtgtagggtgtgtgtgcgagcatgtgtgagtgcagggatgtgaatgcaggggtgtgcatgtgcaagtgtgtgagtgtgcacgtgtgtgtgcaggtgcgtgtgcaaatgtgaggtcggggtgtgagtgcaggggtgtgagtgcagatgtatgtgcaagtgtgtgagtgcaggggtgtgtgtgtacaggggtgtgtgcaggtgtgagtgcagatgtgtgtgcaagtgtgaagtcaggagtgtgagtgcaggggtgtgtgagtgtgcaagtgtatatgtgtgcagggctgtgtgtgcagggggcagacagaaggggtgactggagacaaggcagggggcaccaagaccaggtgccagtttcatgccatctggggtgggaggaggctgtggctcttcctgagacctcagtgggagcttctggagggtccccacctgctctgcgagccctgcacacctgggtagagagagtagggtcttcctcggtctgcagattcccttcctacctggatgttctgacaggccaggccctggaccagccatctttaaccagcaccgcccattggcctctggcccagtggactggggactgcaccgggagggccatccttggagcaagaccccatcccttctggtggaaaaggccgctggcccagagcagcagatgtggacagggccaggggtcaattcacccacagctggagtttgtgcaccttggtgtggattaaagcagaaagcagaagtcactgctggagctcagtgaccccccagccctgcccacagcagcagtagcccagtcccagactctgcagagccctggaccagctaaacccaccccagacggcccctggtctcctggctgcctcttggcacacgtgctgtcagggtgaatttcctattggggagtgtggtcatcccatagcctgctacagttcaggtcccagcaagacccgaggctacacaagtggcccccaacgctgtcccttcctgatgccttctgtaggtgtgcgggtctcatgtacctgctgcccacgctcacccacacagccatttctgcggccaccagggctgcaccaggtggtgcatggggttgagggggtggggtgccagggaggtcacaggtgaccaaaaccatctgtgatcaggatggcaggtgaagagggtaccctggcatctccatggagggagaccagcccgtgggagggggctccagcccctgaccctcacagcccacccccctggactctgttccttttctccttccactgtcccggtatgggtgctcctgtccaggagtcgagcagcacctacctcaggcctctgccacagggaggctgcctcccttgtgattttccgtgtcagtcatggcaaagtcagagccatgagagtgagatcgtttttgcccttctctatgacagaaaatggaacagctcacagatgtggggatccaccagccacctcccaccccagtgtgccctgcccctcccagctggctcagccccgacccccatctccctcacagctcagtcctcgatgggcacctggagcccaggatcaaaccacaggcacagacccagaccactgacgtcatgtgtctctgtctctctgtctgtctctctttgtctctccatctctgtctctctctctgtttttctctgtctctctgtctctctctgtctctccatctctgtctctctctctttttctctgtctctccatctctgtctctctgtctctgtctttccatctctgtctgcctctgtctctccatctgtctgtctctgtctctccatctctgtctctctgtctgcctctatctccatctctgtctgtctctgtctctccatctctgtctctctgtctgtctctgtctctccatctctgtctgtctgcctctatctctttctgcctgtctctgtctctccatctctatctctctgcctctgtccatctttctgcctgtctctgtctctccatctctatctctctgtctgcctctgtctctccatcactgtctctctgtctgtctctttctgtctccccatctctgtctctctgtctgtctctctctgtctctccatctctgtttctctctctctctgtctctccttctctgtgtctctctaggtcagaaggatggcaggccagacgcatggaagagggggcggaaggaccttcctaactctagcaaatcctgccttcagtgcctctctgcctcaggctcacccagcccaggccctggcttaacaggacgcccgtccatggagcacccaggagcgtgaagctcacctccctctgttcctcaaacttccagccgtgacttttattcccaaagggaaatcttatgtgcaccccagaccctggcgtgcccctccccgcagcggcctccccccaaccaccccgcctgtctcagactttcagctggtggggaggggacctgcccgagtgtgcgggaccctgggagtctgagacgcacagctgtggagccactgctcggggtttttgaatttctgtggtgtcatctcctcattcctgccccacctcacctcactgccccttctggaaccttcccaccaggtcacatttacatcaacaactagctcacgccaacccccatgtgagccacctgggagccacggtgacttctactcatgatcaaagtgtagtcccctgggtgtcttctcccatgtagaattctttcacgcactttgttttttctaaaacagaagcagccttccttgtgaggcgtgcctgctagagctggcgctgttagggtcacctggggcgtgaataggtcgccggccttgggttcacccaggaggagccgagggctgccatcccaccttccaggggagcagctcagacgggcggccctgagccctgttatcaaggcccccctgggggctcagggcttggggggagccataagcagtagggaagcccagggggaaggggttgggtgcggggattcagccctgggctctccgaggggaggagggggagcggaagtggagacctgggggcggggtgggcggccatcagagcccctgtcgcacgcaggagtaggtcttcgagctgccgttttccaggagtttgatgtctgacatgaaacacagacgcgggggcgcctccgccctcagtgatggtccttggtgacaccgagtttcacggaatgtcatggcccctccacctggaggcagcaaggcctggtgtccagcccgtggcaggcctgctgagcccctcgtccccaggtcctgggctgcagcagcgatgggggccgggtgtgcacagggtgggtgtgcactttctctcatgtcatgttctgggccggggtcttgggggccgctgactctgaaccccctccccagctgggctggccagcctggtgtggccccttttgggccacgggtgacgctgagggggtggtggggtttccctgcatcttctcctacctggggctgctgggtctgtggctgtggggaacacggtaggcaggcctggccaagggccccaggttctgagccctgcttggaccctggccagcccgtggggaggtctcaggtggcccacaccctgaggggagcccagaggagtgagggtcagtgtcccgtggttcctgccctctccaggggtatcattctgcaggtctccctctgtcagcacgttcagagccctgtgagttctcagtgcagtgcccacgacgggcctgactcagctgtcccctcactgccacctccccgtgtagcaggaggcctgtgcctcagcatctccgcctgcagagtgccatggagtgcacagtgtgctgtggggtggcagggttccaggacaggcctcgggaacatcggctgcccccacacaccctgcccccagaacccctggagcacctcctgctcaggatggaagtctggctgtcataccgcagggctcaggccaggcccagccccatgctgcggggccacagcctcatcgtccctgattatggccatttggggacatggggctgcggggacatggggctgcagggtggataaatggcttcgcccaggtgcttctatgcgctgcttcagaggcagggtggcccaaagagaataggcccaggctcctcacccaccagctccctccccaccttgcaccacccgccggaatcaaaacatgtggcgagccagggccttccagacgctgccagcctcgggtgacatcagcttctgctgataaggtcaggcggggtctcggggctgggctgccctcacgggactgggatgggcctgggagagatctagaccagggcacacctgagggccctgaaatctcagccccactgcgggtcgcttggtgggggttctccatgtttctctgggaagaggccatggctttccctagactcccaagagcctgtggccaccacgagcttaagaaccactggagatgaggccgtacttttgcccctggggccttggaccctgtctcccagtctccacgcgcaagcagcttccagctgctttggggacatagaatggctgtcaccacgtgggtgagctgggtctctggaccatggcagccggacaggtggggcagtggctgtcaggggagctgagcagaggccttgttgtgtccccacaatggctgcctggggggctctggcagccctcctgctactctgacctgtgtgcacacatgtgcgcctgtgagcacgcgtgcctgagcctgtgcgtgtgcatgagtgtgagcacacgcgtgtgatgcatgtccacagacacatttctgtttgtgtgaccgtgagtacgcgtttccttctgtgcacgagaggaaactcgagattctctggatgttgtgggaatgttcacattctcctcagaaagccacacgcttgttcccagaagcaaccttgataaaggtcagcaaagtgctcaggggcctggccgagagctgagggtggggctgggccgacagaaccaggccttgcacggtctgtggtaccacaaagggctgagtgtgaaatcagactttacccatcagatcccagacactgaagcaagggggctttcggagtagagaaaaggcgggaaggaggagagcgactgcgttcatctgaaggataaatgggaggaaaggcccagaaacctggtgatgcaggcggacagcagagtggcaggtggcagctctgtagacatcagctcacctggcacacaccgcgtgcacctccaggatggggagagatggccacgcgtgaggtccatagaggcttctggaacttgcagcgcagctggggccccacacagagctacccaggtgggggtggggctgtgacagctgtccgcctttctgagtggggcgaggtgacaggagtagtcagaaacagtgttccagaggtgggaacagcatgtgtgagggacccagcggagccagcgacagcccagccccctactcgagcgagccccgccggggtgggtcccagaggcccagggctctgggggctcagtgaaggtgggtggtgctccatgaagtcaccaagtggctaggccaggccccgtgagctcctggcccatgggcagaagccaggctcacctgcgtggtgggagtagttgctggatacagctgggtttgcatttcacaggcccctgtcggcgtggtaaggggccttctgcaggccagggtcccagtggaggaggagaagaccggacccgtgcctgcctgtggggtggcagccgcagccagtccctgaagccccactgctctgctgtgggctattcctgccccaccccatctgcacaccttcctggccagctgggagccgttccacggggaccctgtgaggctgccacctccagcctcagaacggtgacccccttgtggcctggagagaacacatgttcactgaaaacaactagcaggctgggcgcggtggctcacacctgtaatcccagcactttgggaggttgaggcaggccgatcacttgacgtcaggagttcgagaccagcctggccaacatggtgaaaccccgtctctactaaaaatacaaaaattagccaggtgtggtgggcgactgtaatcccagctacacctgtaatcccagctactcaggaggctgaggcagaagaatagcttgaacctgggaggcagaggctgcagtgagccgagatcgtgccactgcacttcagcctgggcgacagagcgagactccatccccccagaaaaaaaattacatagtgatggggtctccctgttttgcccaggctagtctttgaccccttggctgaagcgatcctcccgcttcagcttcccaaatagccaggatgtcaggtgtgagcccccatgcccagcctatgccatcaggtcctgcctcttccacccagggaatcccacggggacagggggagggcagaggggaaacaggctctgagcagagggagccaggtccactcatcaaggagcggcaggcccaacagttgccaatcaccctcccctgccacactgatgtcccagccaacacggccaccggcgaccctgagacacgagagctgatcaggagccactggcctgcatcccaggtgtgaaggataggagccagcatggcccaggcagtgttggggacacccatggccccctggggaccccactatcactcaccaaggccaggctggtgggtcagagatggaggtcacctgggagacagtcagggcccaagcctggccacatgggcagaaagcccgagaagcgtcgggtgtcaggtgccccagattctgcagattctccctttggacgtttccacccaaacatgccgcgtggaagctgcctccatccaggcagcgggccttggcggtgctccaggaacctgctcttccatagcaaacaggcctgaaaacccaggccagaactcctttttgaaaacaagtgggaaaaaataaacaaactgaaaagaattctgctgagacagcgagcaaagcactgggacgtgccggccacccccgaaaggcacgggaagggagccgggaccccagtgtgcaggtcaccccggaaggaaccagaagggaggcgggacctgggaccgacaggattctccttcaagacctcctgccttgcaggtgtgcttggcagttctctccctcccctctccctccctccctgcttccctcctttcctccttcctcattagcaagtcagcaacactctggaggctgagacccacctggccgctgtatgctctgggcctgctgggggctgaggctgaggtgccctatgtccgccatccctcttgccccgaacgcccccttggcctgctggttgtcatggtcatgacgcccacctgtgtccaagggtgaagctgctttcttcaatgcaccatcacggacatggggaggccagtgctgtggcagcgtttccaaattagcttgacccacaggcacagggcacccccgggaacccctaccaaacgcccccacctcatgaggagtgtgtcccccatgcacggccaggggtgcgctttgggatctcagaggtatccccacggaggcaccccaggcccttgcggggtctgagcgtgctgtggtggacaggtgcagcgggcgggaggcaaccgtgtgagtctcagcttctcggcctctgagccgggctcgccgtgcacagctcacacggtgatggtctctgtgccttggtgggcgggtcaatggacccagcgaacatccggctcaacggtgacagcaaagcctacctcggaagaatccggtttaggaagaatctgcgactcttaggctgcagagtgagggtgggtggctcaggcacagcaggtgtctcagaacgagggttagggccacagaaagactccctggtagaagtccacctggtccactcggtggggcttccgagtcttgcccgacagttgctgtcctccagggctgtcataaacgcagatgaaagcaggatggctggacttcttgggtcacattttccaccaatatttctgtaaaatttggcccgatttttcccagggcccttccacgcactcagaggactcgggcgccaccaagtggccatcgtggggacgtcaacggccggggtcgcacatcctccggtgaggcgaattttgtatgagttaaatccttcgggattcaaggtgacaaactcctcgggggctgcctgtgggctcggcatccattctgtccacgctccagccccgggagctccagctgcctgcaatgttggacttgcttctaatttgtcactgcattccctgctcttctatagggatcagcaccagggttagaaaacctctgaaggccgaggcaagtggatcacctgagctcaggagttcgagaccagcctggccaacatggtgaaaccccatctctactaaaagtatgaaaactagctgggcgtggtggcacacacgtatagtcccaactactcgggaggctgagacaggagagttgcttgaacctg

SEQ ID NO: 5672 - DNA, 119322 bp, Homo sapiens
  C10orf18 gene - 5766386 - 5845707 of chr10; NCBI Entrez Gene ID: 54906; Build 35; sequence includes 20,000 bases upstream of initiation codon and 20,000 bases downstream of termination codon of the gene
acaaaaagaacacccgccatgtccaagaaaagcaagacattacacaaaaagagaaacatagtccccacatagcaagtggctcagctgcaatattcacagtcacaataatgtcaacactgaaatctgatttaaacaaaaacaattctactggaggaccctggggggaacgtacgggggagtgggggagcagccagtaggttagaggttcatctaccacagaaggacgtccatagggaatgcagaatttctttatttctttatttatttattttatttatttttgagacggagtctcactctgtcgcccaggctggagtgcaatggcatgatctcagctcactacaacctctgcctatcaggttcaagtgattctcctgcctcagcctccccagtagctgagattacaggtgcccgccactatgcttggctaatttttgtatttttatttatttattttgagacagagttttgctcttgtcacccaggctggagtgcaatggcccaatctcggcttactgcaacctctgccttccaggttcgagtgattcttctgcctcagtctcccaagtagctggaactacaggcacccgccacaatgctcggctaatttttgtatttttagtagagacggggtttcgccatgttggccaggctggtctcgaactcctgacttcaagtgatccacctgcctcggcctcccaaagtgctggcattacaggcatgagagactgcgcaacagcccaaaacctaaatgttttggtcgcggtacaccacacatccagaatttgaggtcagaatgttaaaattgtctaaagctcctacggttcgcctctggtgctgctggaatggcagtattgttttggatccaacacattcagcttattcattacactgggaataaaaaacatcagcagaacttatttggggagaaatatattaaataaaaaatgacaatgtcaaaaataccagtgaacctcaaaagttgcggattcattagtttaaaatgtgcctttcttctacagatgcattccataacaaacgatgcagaagacatgctcagaagtgatgccatgaacagaaatattaaaatatgtgtttaaataagcttctgccgttagctattcactgcttactcaattaagctaatcaaatgcagatcacagtgtcagggtcaaagtcttgtgcttgcctggactggaatgccaagtaaaaacacatgcttattagatacctttgatcatgtcaaaggtggttattttgcaaagtcaattaaaatatctttgccttgctatgactgcaacttcctcttcagctaaatttacccttaagacttttccctcttaggtgcactactgtttttaccaggatgaatatgctttagattttttttttctttttaggctttcatagtgcttccgtcgctcatttcagtgaccatattattgcttcataggcagcaaaaaaatttgcttccccaaagagtgtccttccctcaaatccatttcattcttgggctgctcggattttggtaaagtaggctgcgaactgggatggcacttttcggagtgtgccggggtgccccaaggccaccttcactggagcggagtcggggtcacgcggacgcctctgcaggatgctcggacactgcgccacggcctcacccgcgccagtggaggggggtttagctcttaccgtgggctcgcgcctggcttccccgagagggagcaccgtgggcgtttcccaggctctcccccgccactgggcaacggccccgcacgcgtcccgcaccttccccagggcgcgcggcgctcggtgggtttgcggttgcgaaaccccacacctggcgagccgcacggactgcaaccccgcagtgcgctggcctgggacaaggcaccagacatgagagcccgtctgggatgcgcggcaccactgggaccctgctttcaccgcggcccaccccgccaaacgcccccgcccacggagccagcgcggggcgcgccaccacctccccggcgcaggccatcggatacgcggccggcctcaggagccggcgccgctgcctcgctctgacctccgcggcgcccgcacgtacccacgtcgcccaggaagcagccgtccgccgcccggggctccatgcggctcaccggcggccgcgcggcgactctgggcgccgggacctgggccgggccgcgcggggccgctgggcggggccagtctgcgctgggccgcgcgtcgtcccgaggcgaccgagccgggagttgtagttcccgccgccttggcgaggttcccggaggcgctgtccctgggtccggactccgctgtcgctgcccaccccgcttcgcccgtcgcgccgaggagtgtgtgtgcttgcatctgcaaaccgtgcgtcccgtgcacagaatacgtccggtgcaaaacgtgtcctgtgcacttgtcctatgtaaacgtgtgtgtccgtgtgcaaaacatgcatcctgtgcatatgtcctgtgcaaaacatgcgtccgtgtgtaaacttgtatccattgtaagcatgcttccctgtgtccctttgcaaagcatggatatgtgtttccatgtgcaaaacatgtgtcctgtacaaaacatgcatcctgtgcatgtgtcctgtgcaagcgtgtcctgtgcaagcgtgtgcaaaacatgtgtccatgtataaacatgtatgtattgcaaatgtgtcctgtgcaagcatgtgtctgtgtccacgtgcaaagcatgcgtctagcttccagagttcacttgcattgtacagatgctgatgatgctccagagtactcgagttcccccatgctttaactttcaagaaccgcttcccaccagagccggtgttcataatcactgtttctttgatctttcaagataataatttcaaatcgttcaaatcaatttcttaatgccttttctttacgggtggtttttaatccaatgttcccctaagctgcttagcaaatggaagctggggcacaacctggcagaaatgaaaaacctgtttcctgtttccggaataatacccagtcaacaattgagtaagggatttttattttatttatttatttttgcaaagcagcttcccaagtttagaaggtttaaccttgtgaaagttcactgtagccctgtcaggagattcgtcactcacctgacctgtactgaacctccatgcagaagttagtttgggctcaaaagtaaaagtatcaggaatcatccagtctggaaataggtgaggcctggcagagcagccagtttgatctctcacactacaaagcttctgggatgacccaggtctccatctgcagtccagaccgaaggcactatacctaggggacattgaaccatatcttttggaaagcagagcccctggaaatgtggagccccaggcctgggaatggaatttcaagccatttgcactgggcatttagagcctttttgccactttctaccaaaatcaggctcctgcatttttcttgccggttttctgcactttttactaaatgtaacagatttttgtatcgttatatttaccatggatgttatgttttcccctgtggcaatgtcgtgtttgtatgattgcattttcttcaatatttcttcctggacgaagtgtcatctaaattttagtatgatcatgtagaacatatatatatatgtgtgtgtgtatatattcatatgtgtatgtgtgttatccaagtgtttcctaaacatattaataagcaagtatttgcttattatttgtttttcctccattctgttgcttgaccaaaatattaaaagatttcattacagaaaaagctttgcaaagtttacatatatattcagaaatgcattccctgaaagtatttcctttttcttcaatatttagaatgtatttccccagcaagagccagaaaatataaattattctgttctgttctgttgttgttgctaagtctttgagtcccatctggaattcactgcaatgtgtagaatgaaaatataggagctcagttcattcttttctaaactgaaatagagtttttccaaaaatattcattaaatagtaatccacttatctatttttgtgttaatctctttttattgcatgttggttccaattaccttttgaatctattgtaagaacctctatgatattgacaaagtttctattactcatttagcaaatatttgctgattacctagcctaaggtctgtgatttttaaactaactaccacatgtggttttttgttgttgttgttttttgagacggagtctcactctgtccccgaggctagagtgcagtggcaccgtgttgtctcactgccatctccgtctcctgggttcaagcaattctctggcctcagcctccagagtagctgggattacaggtgcccaccaccacacccagctggtttttaaaatatttttagtaaagatggggtttcaccatgttggaagtaaatgtcattttataagatcataacttttgtatcagcattttaaaatctgataagaccgctatttggaaagtggtgtagttggggaccccctacacattgttaaatgagatgtgttaacccctggtttttctaataaagacagtcttcataccacatttttagagtcttctaggtcataagatactcttcttttgcctccaaaataaatagcttgggtgaggactaaatttttaggaaatccaattctatttgcttggataagccatttttcctaaatttactaactcgagaaatcaaggttttgttaaacatgtatatttctgggtttctcctggagattctgggctccagggagagacggggaggcagccctataattttttttaactattgctgcaagtttggcaatcactggtataacccatcctccaaaggctgtgaagaagcatttcatttacaatttatattgactgattctattcctaaatataagagtattgaaaaatatatagggttcttcaagttttggttcctctctccaatcttcctgccattgttaacttttccgagtccttaggaagttgctgggtgcagtggcacacacctgtaatcccagctacttgtgaaaatcgcttaaacccaggagtttgagaccagcctggacaacaaagtgagtcccccatctctaaaaaaaattaaaaaaaaaaaaacaaagcccttaggaagttgtttttggtagcttgtctggtttttatttgtagctgtggcagacagagactgtaatgggctgtcaccatcttggctggcacaagaaatcctgatctgattggatttaaggaaaacaaagtcatcagtttagggttttctccagctcaaagaccaggccagggaccagaaatcttatatggccaccctgcaagaaacccttatctctcgtagccacacagccaagatttctgaaagctaaactcaaagtataagcttgcaggtgactgaaacaatgcagattctattctcaactctgcagagtctctcatggtaaaggtagagaactaattggaaaggagtgggatgctgaagaatggaatgggagcaaatgggcagattttcatgaagctgaagaccttaaacccctgaattctgctgagccttctttggccagtagaaggaatccacctgtgcttactcagagggttaatcttgcctgatgaatctatgatggcctcaccagtggaagctgatttgcaaagagctggggatcctcctcaggatctaccccccacctcacctgtcactgcttctagacctgtaacccagactcggcctgcccggccctgaaaggtaagtaaggttcagaggggtttgaggcctaataaggcacaacacgcaccataaaagttgcaagatttttgccaagtgacattggcagaaatctgtagaacttatataggaatggatcaaagggatactggattagattggaaggaaaataatgttggatcaggccaaaatttttaatcaggtttaccacatcacaattctaaagtcagtttgcttgttcaaatggctaggcatgtttctacaggtgaaatgccagaactttctcagtacactttggaaaaatgtctcctaaaggcttagaatgctggagtagatttttcatgtaaaacctgtccacccatcgcctaactctggctctcagaatctgaagaaaaccccctcacaagactgagaagtccatttgtcaggacggtgggggtcgggggtgggggcttcttaatccttggggagtctaggtcggtaatgatggtggggaagttgctgtcattaagctttactcgctgaattcactgggaatgatagaatctgatgactgagtggtggcacttaattgccaaagccagtgtgggaccagctgccatcatgggcagcagaactggcacagtcatccagatggtctgtcctcagagatcttgggcaatgattagtcagtgacagcatccctagagctgaaacacatggcagcctactgaagccttacttgatttttacaagcaggaaagctctaggtctggcgaagagcagtaaagaaaaatcattttaatagggagtttcagcctcccaaccaattcctagagttgagccagttcacagacccagagctccttgaatgaaagtgggtccaggtacacctgaactctgagccacagagtttgtactgtaactcgtcctcctgaccttcccaaagaatctcatggatatttactaggttgtatattgactatgcactgaagaaagggaaataacgactactcagcaattgcgggtcaatggctctgaactgacactaattcctggagagctaaaataccactatgtctatcagctagaatactagttgatagaaaaaatgatcagtcgagtttgggcataggttcgtctcagataagccagtgggttcttgaatcctgtagttatttcttcagttccagaatgcatcatttgaatatatctactagaaactggcagagtccctacatggattctctgagccaagcagaaggcactgaaactgcctctatctaccaacataggaaaaaggcatttcacattgctggaggaattgcagagtttagtgctaccatcaagaacatgaaccaccgtgcctgtaatcccagcactttgggaggctgaggcagacggatcacgaggtcaagagatcaagaccatccttgccaacatggtaaaaccccgtctctactaaaactacaaaaattagctgggcgtggtgccgcaagcctgtagtcccagctactcgggaggctgaggcaggacaatcgcttgaacccaggaggtagaggttgcagtgaaccgagatcacgccactacactccagcctggcgacagagtgagactctgtctcaaaaataaaaaaacaaaaaacaaaaacaaaaaaacaaaaaaaaaagcatgaaagatgcaggatggtgactccccctgctcccacccaccccatttccattcaaattacataattttgcctgtgcagaagacaggcagtttctgggagaatgacagtggattattataaacttcatcagaggtgaagctgctgtttcagaaacggtttcattgctggtattcagctattggtctgatgaatgcgttctctggctacgtggttacacgtggttagtgaagaccatgaggaacagtttgcttccagctggctggggcagcaattcaccatcactctctcacctcagaactttatcaaccttctgattttatgtcataatctgatctgcagaaatcttggctgcctctccattcaccaggctatgactcccatcgagtgttttgatgataccaagctgattggatctgatgagcaggaattagtgtctactgtcagcatttcagtaagacgcatgcatgccagagggtgggacagaaattcaaatttctattgatctggggcatgtcaagatacacctcccaaagtaaagggaaggggctgcatctgacccctccagccactaagaaagaaacatggcaccaaacaggcttccttggattttcaaggcaacatatacctcatttcaaacgttttttcgttttctaatataagcagccattggctgtcactggctccctattttcagcttctcaaagtcttaggtgtgtgtttggctccagggtgaagaacatcagctttcctgctagttagtcatgccagtgaggttgggcattgataaagtggacaaaggcataaatttccctctaatcactgctttagctgcatcccacaagttcaatgttatgatttcattttcattcggtataaaacattttctaacatttcttatgatctcttcttggatctgtggcttatatagacatgtgtgttctaatttccaagtatttggaaattttccagatatcatcttgtcattgagttctaatttaatacagaatctatacataatatactctatagtatttcaatccttttaagtttattaagatttatattatagtgcagcatatggtctatcttactgaatgttccctatacacactaatagaacatatatttggcagtcaggtgaactgtctataaattttagtcagggcaaattgtttgacaacgttactcaagtcttctctacccttctgattttctatattcttctataatttcctgagagactgaggccagtttccaactgtgaatctgaatttgtgtttttctttttcagttctgtcacatttttccgtatgtttattgaagcttttttactaaattcatacactattaataccgtatcttcttgataaattgatcctttgatcattactaaatgtccctctttatctttttttagtaatattgcagtaaattttttagcaaatttttagtaatttagtaaatttttagtaatttagtaaattttagtaatttagtaaatttttagtaatatttagtaaaatttttagtaatatttttgctagaatgtctacattgtctgatgtaaatatggccacttcagctttcttacaattaatgtttgcatgtatggattttttcattcttttgcttccatcctgtgtttttttatatttacagcacatcccttctacctcacctgtacttggaatctgacagtctccaccctttttttgtttttgtttttgtttttttacagaaagggtctcccgatgttgcccagactggagtttagtggctattcataagcactatcctcccacactacagccttgaactcctgggctcaagcaatcctgttgtattaggtccgttctctcactgctataaagaaatacctgggactggaccgggcacggtggctcattcctgtaatcccagcactttacgaggccgaggcaggtggatcacgacgtcaggtgatcaagaccatcctggctaacacggtgaaaccccgtctctactaaaaataaaaaaaataaaaaaaaaattagccaggcgcggtggcgggcgcctgtagtcccagctactcaggaggctgaggcaggagaatggcgtgaacccggaaggcggagcttgcagtgagccgagatcgcgccactgcactccagcatgggcgacagatcgagactccgtctcaaaaaaaaaaaaaagaaaagaaatacctgagactgggtaatatataaacaaaagaggtttaattggctcacagttctgcaggctgtacaggaatcatgggtgggaggccttaggaaacttataatcacggcagaaggtaaaggggaagcagggaagagaaagaaggggaggtgctacacacgtttgaacaatcagatctcgtgagaactcaccatcatgagaacagcaagagggaaatctgcccccatgatccaatcacctcctaccaggcccctcctcctccaacattggggattacaattcgacatgaaatttgggtggggacacaaatccaaaccatatcacctcctgtctcagcctcctgagtaacagactacaggcacgcaccactgtgccaaacttgtgatgtattttttaaagaaattctagattttgctgattgcatccttgtggtgtcatgtaacatgttcttcgttccccgtattttctgtacactggaaggtggatctatagtgtagatgcttaattagatccaggttttttggtaagaagacttcatagattgtaaacttccaattgcattaaatctggaagcctatgatgtctggctttccttctttttgtgataataaatttgatgagttggtctagggatgatcaaaccgatccattaaaataacacttttttaactcttttaacacctctcaggccatgtgctaagaaattatggtatatacatgatcacatttgatcctcatattaaccctatgaggtaggtcctgttactatctccattttgcagataacaatacttaagcacagagaggctaaattacctgcccaagagcacccaaccagtgagtggcataattggaattggaatccaagtggtctggctacagagcctccttatgtttactgagccatacataatacatgatccatgtgtatgactgagttccaataaaacctcataaaaactcgggaggctgaggcaggagaatggcatgaacccaggagccggagcttgcagtgagccgagatcgcgccactgcactccagcctgggcaacagagcaagactctgtctcaaaaaaacaaacaaacaaacaaactcataaaaacaggcagcaaaccagatttgaccaaggggcacagtgtgacaaccctgctttatggcattaattccactctttatacattctatcaatgttttcagttcatccttagctcttaaaagttttgctctttcttgtaatattacagcacatgacctttttaggttttattttaaattgacacaataattatctatatttatggtgtatggtatgattgtttgatacatgcatacaatgagtaataacaaaattagggtaattaacatatttatcacctcaaacatttatcatttcttttttttttttttttttttgaccaggctggagtgcagtggcacgatctcagctcactgcaacctctgcctcccgggttcaagcaattctcctacctcaacctcctgagtagttaggactacaggtgcacaccatcacgcctagctaatttttgtatttttagtagagacggggtttcaccatgttggccaggatggtcttcatctcctaacttcgtgatccgtctgcctcagcctcccaaagtgctgggattacaggcgtgagccactgcacccagcctgttttgttttgtttttttgagacatggtcttgctctgtcacccaggctggagtacagtgatgcaatcttggctcactgcaacctccacctcactgtctcaagagatcctcccatgcccaagcaatcctcccacctcagcctcctgagtagctgggactacaggcaagcaccaccatgacggcttaatttttgtattttttgtagagatggggtttcaccatgtcacccaggcaggtctcaaactcctggactcaagcaattcacctgccttggcctgtcaaagtgctgggattacaggcatcagcctggccttagctttgttctttttgatcaagattgtattggctatttgtgaacttttgtggttccatataaattttagggtttttaattccatttctatgaagaatatcatcagtattttggcacagattgcattgaatccatagatccctttgggtaagcatgtgccttttggctggaatttcttcttttgttttcttttaaatataaagattaatttcagtactcttatattagtttgatagtgttagagtaatgagtgttgaaaattaaatagtatctatcatctaattttaactgcaacacaggtacctgagacaccaataagaaaaaccagttcctgggcccccacccttacctagttaaaaagaacttcaaggccaggcacagtggctcacacctgaaatcccagcactttgggaggccgaggcaggcaaatcagttaaggtcaggagttgaagaccagcctggccaacatggtgaaaccctgtctctactaaaaatactaaaattatccaggcatgatgacgggtgcctgtagtcccagctacttgggaggctgaggcaggagaattgcttgaacctgggaggcagaggttgcagtgagccaagatcatgccactgcactccagcctgggcaatggagtgagactctgtctcaaaaaaaaaaaagaaacttcaggtgtggggcccagcatttgcatttttagtaagattacaagagtgctgctatgttctctgggaagcaaacaatgaaataagccagggttaggagtgctccccaaaggcttattgggcagtgtgtcagtttcagttctccaagaaacagacaccaagatgggctagacgtgcaatagatttattagggaaaattccatgaagagtaaacggggaggtgcaggggtattgtgggagaacgcgcagatggagataaaagcctggtatctgtgaaggaagagcaataaggaaggtctggatataaggagtctcagatcacagctcaggtctgagtgtagttttgccaggctgatggagagtgcctgagcaaaggttgcccattggagggtccaggcaggcttggaccagcactcgtatccccgctgtgctcagccactgtctgggaacatcctggaggaagtgtgagaggcatggtggctccagtggggtggaagttggaatctgtgagtcaactctgctcccagagcagcttctctttagaaagatcacttccatcactaccacagtctacctccttccaccagataaatctatttctccgtacatatttaggggagcagtttccttatgattcccaagagcctctcaatggggaacttagaaacagaaggtcagtggtacaaataggatctctctctgcagttagtctcagggcttcaatgggcattcatcctcttcttcctccaccatattttaaattttcctatccctcttagctatcacctcaataagtcttcatggctcaccttgtaacatgactcaaaccttgacactcaaggggcctgaactcataatcatcatacatttctaaggctggaattgctgcctgtgtccatcaacagttacaatgggacaagggagtaccaagaggcccccaagtgcacccctggattgtacaagtgttccttcccgtgttcaaagacagctctacctcctcctacccatcggcagcaatcactactgtcaagaaagtcacagctgttcgcacctgctgctgccttgacacaagagtctaagtgccctggcagcagctttagcttgggattcgaagggcaggtgctgagtctcctgggaagaggacacattttagggttatttaattttttctttttgttttttctggcacatgtgagacaccttttttggagacagaccaggatctccaccctggcagaacttgggagtttgggaatggatgtctccccgtggaagtgataggaattggggctacttctgctccatctccacctccagcttccctctcctccttcctggccttctcctagttgcagatattatgtagaaccctccctagctgcctatttattttggaatactatgtcctatctgccccctctaagggccaggccccgtgggctgtctctccacctctgccagtcattagagtaatgacttctgacagcttctatcagaccccgcctgcctctattaccctagatcctgcctgcccctggagaccgcctgcctctagtacctcagctctgtcaccacctctcttattgtgagctcacacctgcataatcgtcacttctcctgggttaactctggtgaaatcgtcaccattcaggccaccacttgttaccaaggtctgtcctatacctcacattcctcttggaatgagcccctttttgccatcaggaccgtgagtcacccaattccaaaaccccagctggccttctgttttcttggaccactcttagtatttacttgtatcagttcctggtctctgaaaagcagacatacaggcgatttattgggggaaatgcctgtaaagaataaaccgggaaagagcaagagtaggcggggagagtctcagattgtggtgcagacctgacacttgtgcatggaaacgaggaggaagaattgggtagggagagtctcagaccaccatggagctctaggaaagtctcagctgggagatgtgcacctcagcatgaaggttctccgtgagagaagccctgctctgggcaggaatgacccaaactcctcctccaccacgctcaggccctggctgagaacagcctgagggcagcagatttcatcctgcacttctctccacttccatagcgcttctttttttaaaaaatttctaaacacagcactttgtatttttcttacggcattttttggaggaagtcctgcagtattgctaagttttataaattgggcaatgggatactcttaaaacagagacattcttggtttcctacttattattacagatgatttaaccccttttactcttcccccatttttatacacacacattttctctccctcatactcctaatataacgtgtgtatgtgtctgtgtctgtgtgtgtgtggttaaagaacttggggtgatatttttgatagatacagagattaaaaatgatgcagttgctaatatcaagtaaaacaaaatttgtacaaatgttttttatggcttagctgtaaacacacaataaaaaatgatgacatgactatatagaaagcatggaggaaagcaaatgtacacttgcggggtgttgcctgaaatagctcagtcctcattagccattttaggaagattttatctaaaactgagaagtcaactggagacagtagctcatgcctgtaatcccaacactttgggaggctaaggcaggaggattgcttgagcccagtagctcgagaccagcttgggcaacatagtgagacccccatctctatttaatatagtaataagaagaatgaaattgagaagtcaagagtggcaggaaaaaataattgagtaaatagcagaagaaacagctaaaagaattggaagtgcttgtctccaaggaggaatcaggtagaggacaggacagaggatagctccatattattttgtgtcaagcagtcttgtcgttctcttgaacttttatttccatgttagttattaaaattgtatacaatggagaataagagtaggattgtcaggaattggagttttcctctccgaccttctcattctgcagatatggaaagcccagaagagggagtctgtgtattcagcacatggatttccattctctgagtcacactaagtgatgggaatacagtcatggacaatggttactttgaaatcctttctgttagatctgacatctggtcatcttctgggcagtttctgctgcttgtttttttctcattgtatgggttatactttcccatttctttgcatgccttataattcttgattggcaactagagtttagataataaattgacgcaactctgtgtaatatttccccacacacatagtgttaagcttctgatcgtgcttctcatgatgacacaactttaaatatgcccaccatcactctggtacgacagtggcattggtagaactctctttctctgaaatagatattaggtctttataggtctatatctactaaagatataacatcctgcacttaaaaaccttgctataaaaaacacaggccctgattgtttcactgattaattatattaaacatttatgaagaaatactgccaatttaaatcaaagtattttgaaaattaagaaagaaaacttcccaactcattggatgaggccagagttaccttcatacccaaactgaagacctcacaagaaaaataaaacaaaaacatagaccaatatcttgtatgaatacaaatgccagaatccttaacaaaatatcagcaattcatatccagtataatatatgaaaaggataatgaatccagaataaattgggtttatctcaggaattcactgttgatttaacatttgaaaaatcaattgatgtaattcaccatattagtagatcagaaaagaaaaactatataatcacctcaatagatgcagaaaagtatttgaccaaattcaacacccgtttatgagaaaaactttcaaaaagtaggaacagaagggaaattcataaatctaaaaaagggtacaaaacaccaaagctaacattatgcttaatggttacaaactaaatgcttttgcactaagatgagagacaagacaaggatttttttttttgagtcagggatattttatttcactccttatattgaacattacattaatggaatggccttgatgcaataaggagaaaagaaatacgaattagaaacaatgaagtaaaactatttttatttgcagaaaatgtcctaaaaaagcataaagaatgcacacatgtgcaaacaaatagctactggatataataagtgatttcggcaagctacaagatataaagttaatatggaaaaatcaattttatttctatatactagcaacaaattattgcaaaaatttttagtactattaagaataacatcaaaaacaaagagataaatatgacaaaatatgtgcaagagctgtacactgaaaactataaatattgctgaaggaaatttttaaagacctgaataagtagaatttgacaattagtaagatgttaattctctcccagattgatatgtacattcagcacaatcccaaccaaaatcccaacaggttgtttttgaggtagaaaataagctggttctaaaatgtatacagaaacttaaaagacttagaatagatgggccgggtgcagtgactcatgcctgtaatcgcagcagtttgggaggccgaggcgggtggatcacctgaggtcaggagtttgagaccagcctggccaaaatggcgaaaccccatctctactaaaaatataaaaaattagccaggcgtggtggcagacacctgttatcccagttactagggaggttgaggcaggagaattgcttgaacaggggctgggggtggggggcggaggttgtagtgagccaagattgcaccactgcactctaggctgggcaacaagagtgacgttccgtctcaaaaaaaaaaaaaaaagacttagaatagccaaacatacttgaaaaagaacaacattgtatactatgcaaattcaaaccatgacacacccttcagagtggctacaattcaaaagtattggcagggatgtagacgaactagaattatctttgtggaactgtataacttagtaaaaccagcttgcaaaaagtttgaaatgatctgctaaagttgaacatatgcccttgttattgccacaataatgccctataataaatcaccccaaactcggttagcttttgataacagcattaactttcagaatccttgatcttcaggatgtctaaggctctgttaatccaaagtgtgttggactgtgggttggtgtcacatctgttccacataggtttgttctggagactcaggctgaagagacaacagctacgcgagatattttctccacatatgaatcacctgagcacaggagccaactcaaacagcacgagcacactgaagaatcctgctgtgtcatgtctgctgatattctatcagccaaaagacctctcttagaccaagcccaacgtcaatgaagtagagaaggaaacttggccaaccgtggggaataagggcataaatatttgcagaaacaaaaatctaaattatcatgtctagcattccaaaatcccaatcctaggttttcatccaacagaaatgagtgcccatgtacaccaagagatgtaaatgagaatgatcacaaaagtattatttataatagccaagaactggacacagcccaaatgtccatcaataatacaatgggtaaagcaaatgtgttacattcacgcctacatatacagcaatgaaaacgaaagaacaagtacacccaaaaacacagtgagtctcacaagcaggcacaaaattattcactttatatacagttcaaaccacaagcaaactaaatgataaagtttcagggtgcatatttagttggcaaacttacttttaaaagcaaagaagagagtaccatggaagtcagaatagtgcttaggctagggaagagggatggggtactggcaatgttctatttcttgatgggggtgttggtttcatgaatatttgccttgtgataaatcatggagttgtacattccggttttgtgcactattaaaatgttgttgtacttcactctctacttccacagtcagccttcttctgttcttgaataggtttcatttcacttctcaagtcctttgcacttgctttcccttctgcctggaaagctcttcctccacgtattccaagctttggttctatcagttttgatctttagggtttgacctcagatgtgcccatttcagtaagatcttgtagctccactacttctgcccttggcctccagcccccagtcccatccactagcatttccagtgagttttcacagcatgtattgttatctgagattctattttcttgtcgtggtgatttacctgtgtttgtcactcacctctggaataaattccattataggcagggtccttatctagcttgttcatgattgtaaaaccagtgtctattacagcacctggttacagtaaacagtaaacacaatgactgaatctcttggtattaccagcacagtgcttgactcatgatacatgttcattagcacttaatctctctcattggtacagtcatatgtcacttaatgtttcagttaacaacagaccacatatccaacagtgatcttatatgattataatagagctgaagagttctattgcctagtgatgtcgtagccatcttaatttcgtacagcaacacattactcatatgtttgtggtgatgctggtgtaaatgaatctactgcactgccagtcatataaaagtacagcacacatggccaggcgcagtggctccaccgtaatcccagccccccagtgggacaaaatggaggtgaagacaatgatgttgatgatcctgaccctgtgtaggcccaggttaatgtgtgtttgtgtcttagtttttaacaaaaaagtttaaaaagtaaattaaaaaaatttttaaatagaaaaaaacttacagattaaggatataaagaaaatatttgtgtacaatgtgtttgttttaagctaagtgttattacaaaagagtcttaaaaagttttttaaaagttttaaaaagttaaaaagttacagtaagctaaggttaattatgaaaaaatttaaaaaaataaattcagtgtagcttaggtgtacagtgtttataaagtctacaagagtgtacagtaatgtcccagaccttcacattctcattgctcactcacagactcacccagagcaactcccagtactgcaaggtccattcgtgagaatgccttacacaggtgtaccattatttttcatactgtatttttattgtaccttttctatgtctagatatgcttatacaaatacttaccattgtgttataattgtccacagtattcagtacaataacatatagcatgggtttgtagccaggagtaatgggctatggcttatggtgtaagtatgtagtaggttatgcttctaggtttctgtgatgttcactcaaggaccaaattgcctaatgaggcatctctctcataaggtgtccctacagttaaatgatgtttgcatgactatttatcatgggcaagggtaaacctgaatttattgatggtcaccttagctctctgtgcatgtgttataaatttctagagatgctttcctagggggtaacagccacacctactatatggattaaaacaagggcaaaatttccaaaatgtcgcattcgggccagacaaataaactgttcttgcagcagcacctggggaatgaaacgctgagaagggagaaggcgcccgaaggcgaccacgtgggccacagccacagcactgtaggtcagccgagagagcgtctcccgcctcttcccaagggcatcttccgcctcctgtcaagggtcggcaacgcgagacaccacgcgctcgttgggatcggccgcctaatcaggagcgagctgtggccttacgcctgcgcagaggggagacgcgagcgccgcgtggacgctgacctcggtccgcgcctgcgccttggtttcttcccggcgattggttcccatctctgagggagacgcctcacttcagttttcactttctttttttgcccccccctccccttttcttttcctttggccgcgaggttttgcttccggttgctagcgccggtcagagagaaagtcggcatgttctcgcaggctgccgggcgtcccggggttgcctcttgcccgtgaccctgacgggagacagagcgcgggcggccgcggcgtccctgtcagcgcccgcggcgaggaccccggggctggggcggacggcgtgcccctgaggggggtccccgcgggagcgcggagccggcgactggtgcttcccacgtgcgccggtgtcgcgagggcccgggaggacgcagagcacggccgggagaagcatgggaaggaggccgagccgggatctcaggtcctcgggggcggcggccacgccaaggacgggtaagtccctcctcggcctgggcgcccgggaaccctgcgaggaggacggcgggtccccgaggccgagcgctcgggcagctgccggggcttggctgcgagggtcgacgcgttctccttgccttttgccgcgctccgggtgagggggtgggaggggtcggcgccttctagatgactcaaccttctgtcctgcgctacaacctgtggccgcgctcggtgtcgccggcagggagatcctaaccgtgtcatcttgcccctttctgaggcgtttcgtttgcgtcgcctgtcaggggacagctgcgtcctcagggatatgctgataagttcttggctgaagtttccgtcttcgggtttgcaccggctgggaaatcatttcctgcgggttctgcgtgaagcctgctgctactcgagacttcatggcaatgcgccaccttttctttttagggtaaaacaggtctctccgaagggagggtcatttcagcagcaagcgcaagccgcgttgggataacttggtgcgagcaacacagaagtttgtctgaaggcggcgccaagcagcgtttcgtgggagaactgggttgatgactgaaattttgaggaagattactttgggaattctcaagtttctcttagtcgcttcttgtctatttgaaatctgtaactttaaacaaaccacgcttactcttccttattctccctgtaaggtacaattagaatagaaaagtttatgaaagtgtatccaaaacttaaatatgtggcgtacaagtgtatggtattattggaatggcattcgcgatcctagagtctacagtgttccctgaataaaactaggggtgagcctggcggtaatcctgcctaggaggtttatagcaaagcagtgtcccctaacggtgcaagaatacccttctgtcgaaaaactgccttataggaatgggtgactgtatgcggtatgtcctgtactgtacatcaataaataactaagccaggccagaaaaagggtgacaaaaggtccacaattatgttaaggaagaccaagacggtatatttgaagttttgtgtatacagaacatttgcccaaatgtaactaatttttttaaagggagattataagcatctcctgtggtccaaacatagttgttaaaatgggttaaaatcggtgaagtgcctaagaacttgactgagacatggtgtttgttaaatacagtatactatctattcagtaaaaatagatcaatatggcatgtatttatcaagtgaatttcatttttctgttggtagacattcaagttattttcaagatatccctataactgacaatactgcagtgattatctcttgctgttataaacagtgcttcaggtggtcatgatagtatttctgtagaattgactccttatgagagtgctggataaccatgttgctaaattgccctgaaatgattgtacctttttatgttcactcgctcaaaagatgtgtttttatctccatgctagccagcactggatgataatggtatttttaaaatatcttagccacctagtaattgaaagtaacattctgttttaatttttatcttccttggtgaatacaaaagttaaatctttttaggcaggtcatatcatttgctgatgtttttattgagtctgagctctcttttctttcgcccatgtaactattactgtagcattttaattatcatagttttataatatattttggtactttcttttgaaaaagagctttgggtttttcttttgcattttttcttccagaagaaattaaaactatctttttaagtcctatagaaaatcttgggatattgtttgtgatggtgttgaatatataatctgagaagagacatttatttgagtttttccttctaagagaatatgtacatctcccttttctttaaaaattttttattgtgaaatatgtcattaatatgtactgacaaagcgtatctgtgtaataaatatgctttttgtcagtacatgttaatggtatatttcataacaaaaattaataaaagctttagaaactttagttagtttggaaaccttttgtgtgtttctaccccaggaggaatgcgttccctgccccccgttaccctggccattattaattttgtgttaattattcccttgcctttttaaacagttttatcacctatatagatatccttaactagcattgtttactcttacctgtttttgaactttatttaaataaagtcattctgtattctatgagttacttttgttaaacattgtttctgagattcactcatgttaaagcacgtgcctatagtttagcaatttagaaactttattcccaggacccctctacactttttaagaaccattgagggggccaggtacggtggcccacgcctgtaatcccagcactttgggaggccaaggcaggtggatcacttgaggtcaggagttagggaccagcctggccaacatggtgaaacaccatctctactaaaaatacaaaaattagccaggtgtggtggcaggtgcaggtagtcccagctactcgggaggccgagacaagagaatcacttgaacctgggagacaggttgcagtgagccaaggttgtgtcactctacggcagcctgggtgacagagtgagactccgtctcaaaagactgctgaagatcccaaagatcttttgtttattggattatatcaattgataattaccgtattagatattaaaactgataaatttgaaatgtatgtttatttattggtacctttaaatataataacccattacatcttaacatattttatctccccaaaattagtgacaagaatgggatttttgtacatttttgcaaatacgctgaaggtctcctttaatgactagagtctcatctgcttttgtattcattgtgttgccatgtattattttggttgaagtgcatgaagaaaatccagcgtcattcagctgagtagttagaaaagagatgaatattttaataatcttttcagatgattatgttcttttttgatactcatcaaaacctaacagttttgtgtttttgtttctgttttgttttttaggacagtgtcttgctctgtcgcccaggctagagtgcagtgatgtgatcatagctcactacagcctccaactcctgggttcaaacaatcctgcctcagcctcctgagtaactagggctacaggcacacaccaccaggcccagctaatttttaatttttttttttttttttttttttttgtagagacagtattgctatgttgcccaagctagtctcgaactgctggcctctagcagtccccctgcctcgcctctcaaagcactgggactataacatccagcccctaacaatttgttaaacgttagctgcagtgtagaattgcaaatcatatgaatgaacttctcatgctctgacattaacattggcctaccatgcactttcaagggctcttttacctacacatgtgtcatttggaaaacattggttcactgaattgtgcagctctttcacatgacacatttcattatataatttcagaaaattggttgggtgcgtgggctcatgcgtgtgatgctagcactttgggaagttgagctgggaggattgcttcagccaggtttgagaccagcctgggcaacatagtgagaccccatctttacaaaaaaaaaaaaattagtggagcgtggtagcacacacctgtgttcccagctacttgggaggctgaggtgggaggattgcttgagcccagaaggttgatattgcagtgagccatcatcatgccactgcacaccttcctgggtgacagagcaagaccctgtctcctttaaaaagtacagtttttggaatggcttttattgaagatctattgatgatgaacactcagtttttgttcacctgaaaatgtctttattttgcagccattcttgaatgatgtttttgctgaatacaaaagttggcaattgttttcttttaacatgctgaagctcttattcctctgtcttttggctttcattattgctattgaaaagtcacctatcagtctatcaattcattttgttctgactgttttttgtgggttcttttgttgtttgttttgatctttagctttttgctgctttgctgttaacttgtatgtattggccgggtgcggtggctcacgcctgtaatcccagcactttgggtggccgaggtgggcggatcaagaggtcaggagttcaagaccagcctgaccaatatggtgaaactctgtctctactaaaaatacaaaaattatcccggcatgggggtgcgcgcctgtagtcccagctactcgggaggctgaggcagaagaattgcttgaactcgggaggcagaggttgcagtgagcagagatcacgccactgcactccagcctgggcgacagagcaagactccatctcaaaaaaacaaaaaaacaagcatgtatgtatcttgcttgggattgtcttcttaaatctgtaaattggagatgtttttaaatgtgtttattcataatttattaaatgtgatttccattcgtgttatttatcttaatgtataaataattttttaaattatctacatagtaaatattctcttctggtcttttactcttctttcactttgtttcccacagcttccccaacagacatacattgccaaacttgtggatttttgataatttttgataagttaaaagtaaaacaggaaatctctggaactagtcttttggaagagggggtagagtttttgactactcttttcattttcttcatcattattggtttatttaaatgtttcttccatttagaccaatgttggtaaattatatttttatagttttcagatttattgatataaattatacatggtgatttataattttagaaatatcttccttgtatttgtggttgtatcgtctttgctttcaatatttaattttttcctttttacttatttatatttgctaaaagattacctactttattattactctacaaataaccagcttttgcttttattgcttggcttagttggcttttttaatttgctttttaaaattactgtttttatcataagaaatgtatctggagtgtactttgttttctcttagtaagattttaattacatttaatcggagaactaaatcccttgctaatattttgtataaagattcactaccctccttggcatggtgaaatagaccctgtttagaacctttcatgtacacctgctccctcattaggagaaggaatattcaagatcccaatgcctgaggtttgtccagttggggcacctactttacccttgtgcatatcccctatttatctgtgcccaggacattttgcgtgggctacgtgtagaggtggtggccatacatagttatctttattctggcataaatcagatgtcacgttctcttttgccatatgtaataatcaagagtacccaaaagtgggtcttgaaatataattgtttctgagaggaacttattctcaggatatttttgtaagagggacaaaactacttaacagtgtgtatccttgcaataagtatattaatgaatacgatacaaccattttatacaggcaaaagatggtttaatgccaaagcacaaactcataaacccagttgatgaggagccagaacaatggtcattactgtatagagatgttttaaaaagtcaccatataagctttgaaataattctaatgaaaattatatgaccttgaggctgggcgcggtggctcatgcctgtaatcccagcactttgggaggccgaggtgggtggatcacaaggtcaggagatcgagaccatcctggccaacatggtgaaaccctgtcactactaaaatacaaaaaattagccgggcatgatggtgcatgcctgtagtcccagcttcttgggaggctgaggtgggggaatcgcttgaacctgggaggcagagattgcagcgagccgagatcacgccactgcactccagcctgacgacagagtgagactccgtctcaaaaaaaaaaaaaaagaaagttatatgatcttgaatataaaaagtatggtctctaaagaatttgttgttgtttttacataatgtaggaggaaaaaaattgtggtgtttataagcatcagcctgattaccaaaaatactttttgtggtagactggattttgagaatgttaaaacaatcttcaaaaattgaatattaaatccaaaaataagcaagccacagctaaatgaaaaagtcatagtacataggtgtaatacactttactcaaggggtgtaattccaaaaaaaaagtttttaaaaaaggtaatttgtctcctactggatatactaaataccttagtgaattttttattttgaatagctctttgttaatctacataattgtttatgaatttaacttgctttataagttcaaattatcctatatgctatacaacacactaatggtaatgatgaataagatctactaattaggctttcttctgggcaatgcatgtgggtatcttagattgcttagttaaaacataatgagtaaagatgtccttagatcaggccaaacacttcatcttccccctgcacctccgtttgattaaatttttcgtaaattttgttagggctgcatggcttattgggaagggacctcatccctaccccaggcattggtatcaattttcctgaagctatgtgaagtattaaaaaaccatattcaggcctggcatgttggctcacgcctgtaatctgagcatttagagagacagaggcgggctgatcagttgaggtcaggagtttgagaccagccaggttaacacggtgaaacgcctttactaaaaatacaaaaattagctaggcgtggcggcccatacctgtaattccagctactcagaaggctgaggcaggggaatcgcttgaaaccaggaggcagaggttgcagtgagcccagattgtgccactgcactctgtctcaaaaaaaaaaaaaaagccatattcattatgactttttaattttgtgacatgtataaatacattttttattatctacatagtaaatttaaaaagctgcatcaaactgtagccggtgaggctgcataaatgatgtgggacgaagagttataataacttgagatcactgtagtgaaaagaacgtgtattttagattagacctgagattgatagatatccttactaggggcttgcgggtaggacacttaaggaaattggagcttggagtgagctttgtaaaataatactaaaaccatcctcctagtggggttactgtgtgacgtccaagaactcgggggcagttggcttgctgtcctgtgctccgttctgacgactgagcccgcccaggtctgcagggtcctggggtcctgcgggttctgtagggttccctggtgtgtggagtccctacccgctacaagctccgttgggtctacggagtgtgcggggatctcccagccctgttggctgtacgggctcagtggggtttgcagggatcccctcgttctgtggggtccgtgggcgccgagtcagggccatgcccctgggctccgctcgcggagccggcgtcgcccttgttgactttcaaaaggcgccgccggccccgcgccctacacgctcagcacgccctgcgcggagttccccgctctggcgcactggccttggctggcgggagggggccggaggggctgccggcggagcagagacacagccaccctccccaacacaccatgaggtgagtcggggaggggcctaggtctcccacatgctgttgtgggaagctctgacccccgctgtgcctggggcgggctcacccacggaggtgactgttaatacagcgctgagtgcgaaggagacccgagaaaatgggcctattctgtctagtaacgttttaccttctggtgagggtgtggggagagaagctttggcagggtcagtgaggccccgcagcagagccctggtgatgaaagacacttttgtatggtacccgaaggcttaacttcactcctgattgtgagtggattgtgtgtggtagtggtggagcccttgcagaaccgccagagagacggtgctagttgtgtgtgtgcctatgtaaacctacaatagctaaggtcatcttttgaaatgtagaacagggattgcacattgactttgcgcttcaagtatttgcaggttattaccttagtttttactccctttgtgcgtgccgtgattatcttggtttaaactcgtatgtggcaagaaattttttaatgaatgtttaagtttctgtgaaaattgtgtatttctcaaattgtattttttggcttttaatagggtcactttgttttctgggtctctgttttgacttacgggaaatgctatttgttttctctacattttcttcatttaaaaaaaacctgtaacttcaggagttcaagaccaacctgggcaacctcatccctggaggaggggggaacccccacaaaaccacaactataactggctgctacttaggactacaggagatcttttttccaaagtggaaatagctttatttcacccagattatgtttatttaaaatttcagataatatataaagctgtaaaaagtaaagcaaaaactacctgtacttgtcccatccaaagataacttcatagaatatttgattatctactgtggtgctaggagctctgttggaccctggggactttggtgaacagacaatgcctgcctctataaaccttacattctgctggggaaaatagacctctcccaacccaccaaaaagtaaatttataataattccatgttctaatgctttaaagaaaacacttgcagcagggtaatccgaggtttatctgagtggatgacttaaatagatgtcactaaaggaacagaaagagctcaaccatgggaggaatggggagaaaaaaaaaagaattctggtcagaaataacagcatgcacaaaggccttaaaagaggaaaaagctataaaaagaaaaatccatgtagctgccactcagtagtaagtcagggaaaagtagagcaagatgaggtataggaaattggcagggaccaaattttacttgtccatggccaggagggtgtgttttgtgttctgagggcagtgagagggtactgaggggctttaattagaaataaagtgatctggaaaactaattgattaatttgttaagtaaatatttattgaaaccctactgtataacaggcactgttctgagcactggcatacaacaatgaaaaggacaaagccctgtattcatgaaactaatctagtggttggaggacaatcagataaacaagaaaaaataccagatattgataagtgtgcagaagatgaccattgtttaaattgtggtttatattctttaagatatggtatattacacatatacttcttttggaactttctcctgaataatttatggtaggacatttttcactgttactaaatagttttctttgggggcatcttaatttgtttttggattaagtatggtaaaaaatagcatgcataaatgaagaaatactgtgcagcaacaaaaatttgcatgttacaaagcatctggtgaacgttatatagtaacttccttttgacagtctgacatgtggctctcctacccccatcccagaccccagctgcccctttgtggttttttattttgacctattagtatggttaaatttatggatttactatttattgaaccatttttgcatcttggaatgagccctaattgatctgttattattttaatgtcctgatggatttactttgccaatgcatatatttaggatttttatatcaatattcataagagatcagtctatagttgttgttttttaatgtgttttgtctagttttggtattcgcatctgattgctttgtaaaaacaattgagaagtttcatttctttttctgagtttcggaacagattaaatagccaagtattatttattcttcagttaccaaattcatatttactaaacactatgtgctaggaattggactggatgctgagtaatcagtagtaaacaaaacagatatggttcctgccgtgatattgcttggctcattaaggaaaatgacattaatgaagaaactacacatatgtaattataaatcatgcaagaaaaggacaggatgctttgagataatatcattgaagatctttagattgtgctttttatgcatttgagtaaatgactattgagtacatacatatacactaacagctaattatttaaattagtatgtattgatttggtgtgtaattagggctgtggtgggtgcattagtaaaatgaggtcttcataattacacaaaatataaaataatggcaatagtagctaccattgtaggaggtagctgcatcattttttaatggtagaaattaagacaggttaagtagacacttttagtctaacatgttcaattgtatacactctttggaagtctctcttaagattatagtaaaagaataaggatataaatccacaaagatcaagaggaggtgagaggaagatatagctgaaatcagtatttgggaaactagaaaggagatgggcaagtaataaatgatttcatgaattagagaatgctgaaagctgaagagaggtaacccagcaaggagcaagcagattctttccacagaatctggaaaagttttaggaattgggggtatcaagtacaggacttctgaagtcaagaattacaggatggggtgggaatagaagggttggttgatggtctttatcattttgataccctggaaccccttctccactcccacacacccagacaactactctctcctctaccttgacggaagactgaaggtttatacccaggagactaggaggctccagatggttaaggtgggggtgaagcacctaaatgaaaatgaggattgagtgaaagtcaggtcaacatgctgaacctagagcggttgtctttttttgattggcttccaaactatcaggcttacgtgcccctcaacaaaacattaacggattcttagctggggaaacttaccagcccatggcacagtatttaacagatatgaactatggaaattcacccgattgaacagttggatccatcagatcacctggagagtacagccgctggtcaggaagcattgttcacgtaccacagcttctagtcaacttttatttcattttttgagacagggcctcactctgtcacccagattgaagtgcagtagcgccatcataactcactatagcgttgaactcctgggctcaagccatcctcccacctcagcctcctgggtagccgggaatacaggcgtatgcccccacgtccagctgatatttttattttttgtagagatggggtctcactatgttgccaggctggtcttcaactcctgggcttgtgatcttcctgccttggcttcccaaagtactgggattacaggtgtgagccactggtgcctggccctagtcagcttttaaatgcctcacatttgagtataaatgtacagccaagggtcgcctgccatagaatgaaagtctctaatgaaaaagagaccaagtaggaaataaaaggagctgagtataaatagatttacttcagggaacagaagaaacttcaacaaataaaactagtatctttaaagagaagatattacatctgtgaaagatgaaaaagtttatataaaaaaaactgctgcgacagaagaaatttcttaaaaatttaatacaaggtttagataataaagctgaagaattctccccaaaaaaccagaagagcacaagaattagaaaataagagtgaaatgatgagaaaattagagggccaaccaaggaggttcttcatctaatacagtggaaggaaactatctgtgtcccagaactgaagaaggtgactttctaggttgaaagggcctattaagcgccctgatcaataaaacagaaacaaacaaaaaataaacaaaacttcattgtaccgaatgtatagttccaaaaggaacaagaccagattgattttcttcctacttctgaaaagaagaatgggggcagagaacgaggtgctagctcttaaactgcattttaacaaattcagggaaaaaggaaaccttaactttaaattgtatgcaagtgctgttaggtatccccagtgggaagttccaacagttctgtgacaaagataaagttgcgcagaagaagcatatttcaggtatctccagcaacttattcatatccagaatcagccctatccaaagagagaagtctcgtatacctggctaagactgaggagccatatggtatcaaggaaggagaaagcagaatgagaaagtgcctgggtggggcatgggggaggcagagatcttagtgctaataaagtactcctagaaatgagtgcataaccttggaaagcaagggttgtgtctctaagaggcaagcagagctggcaataaaggccctcctgaaccagattacatttggagattagataaggaacaaggcaccatattataaaacagcagtcctctgatttaggaacagagggaaccctaaagaaacatgacaagtgccctacccctccctacaccctgaatcttctgataacagtccaggataattcatctcattcagacatgtataacaaaaatagtatgtacagcatccatacagtgactgtctggtagatggtattttttatgttttatgttggttttttgttcttttatattatttttattattgaagatataattcacatgccataaaattcaccattttaaagtgtacagttgactggcttttaatttattcccaaggttgtgcaatgatcaccactaccaattgcattattgaccctagtgctttacttttccttatgttcactccatgaccctatgcagttcctttcattaaagtgacagagatatttccctactccttgactttgtgtttggctatgtgacttgctaaggtaaaagtgataacatatcagtttcaagcctaagccttaagaggccttgggtatttttatttgttctctttctatctgtgccatttccatgagaaaaacatgtctctgctagctcattggttgagggaagatgagagataggagagtgagggccaccccagctgagttaagctgaattcaatgaacactgtagagatgtgagtgataaaaaaatgattgtggttgtaagccagtgaacttcaggatggtctgttaataaacattagttaaccgaacagttatatgattaaaaataaaaaaagagagagaaaaaccacaattttctacagacgatatttttcaaaacaatattagcagaaaataaatcacaagtggtcaagctactgcctgtggtcttgcctatttttgtaaataaagttatatggggacatggtcattcctatttatgcattttctatggctgtttttatgctctaccggtagagatgagtagttgtgacagagaccgtgtggttcataatcctaaagtatttattttctgaccctttatgaaaaagtttgctgaccttttgaagtagatggaaaatgtgacctaaggttttaatacaaattttaaaataaatttatataccacatcatacccattaagatagctgtaatcaaaaagacagataataacaagtgttggtaatgctgtgaaaaaattggaaccttctgtatactgctggtgggaatataaaatggtgcagccactttgaaatcagcctggcagtttctcagatgagcagacacagatttactggaagagcaagccattctactctaaggtatatacgtaagagaaatgaaaacatgttcacataaaaacttatacatgaatgctcatagcataattattcataatagccaaaatgtagaaacaacccaaatgtgcatcagttgatggataaacaaaatgtagtatatccacaaagtggaatattatttggcataaaaaggtatgaaatattgatatatgctttaacatggatgaacttcaaaaacaggctaagtgaaagaagccaatcatgaaggaccgcgtgctgtatgactctgtttataggaaatggtctggaataggcaaatctgtagagaccgaaagtaaattatggtttcctaggcctaggaaccagtgaggggtgaggaggatagctaaggggtagaaggtttctttggggataatgaaaatactctaaaattgattgtggtgaaggttgcacaattctgtggatatactaagcacaattctgtggatatactaaaagcaattgaattgtacactttatgtgggtgaattgtatgccgtatgaattatatctcaacattgtattagaaaataaaattaatgaagcatagaagttacggagaactactggaaagaagaaatacaagaactcaaggaagagacagccagacaacagtagagtgtgaaatgggaaccagcagaaaaaaagaaatagagaaaaatgatcaagccatttcagaagtacacaagggagactagacaccatggcaaagatcataaaagtagaaatgaaattttatggtaagtatattttaccacaattttgataatgcaaagaaagaaaacaaaagatagacaggagaaaaatgagtaaaacaggtacacatttatttttattgatgcgtaatagatgtacacagttttaggatacatgtgataatacagtcatataatttgtagagatcaagtcagtgtagttgggtcatctgttaccttaaatatttctcttttctttgtgctagaaccactcaaattctattcattttgaaatatataatagattgtaaactacagtcaacctactgatctaacactaggtcttctatcaaaccatatatttatacccattaatcaacttctctttattccttccttcctcctaccctttccagcctctcataaccaccaaatctactctctattttcatgaaatccacttttgtagcttccacatatgagtgagagtatgtgatatttgtctctgtgtgcttggcttatttcacttaacataaagacctacagttgcatcagtgttgctgaaaatagcaggattttattttttttttatggctgaataatattgcattgtgtatactacattttctttattcatctgttgatggacactgaggttgattttatattttggctgttgtgaatagtgttgcagtaaatacgggagtgcagatgtctttttgatatgttgattttctttcttttggatatatacccagtagtggaattgctggatcatatggtagttctgtttttatttttttgagaaagctctgtactcttttccatagtggctgtactaacttaaatttctaccagcagtgtataagggttcccccttctccatatcttcgccggcattcattattgcttgtccttttagtaaaagccattttaactggggcgagatgatgtctcgtagttttgatttgcttttctctgatcattcatgatgttgaggattttttcatacacctcttggccatttttatgtcttcttttgaaaaatgtttattcagatcttttgcctgttttttaattggattatttgtgggggtgtgtctgtgtgtgtgtgtgtgtgtgtttgcttgcttgcttgcttgcttccttgctgttgagttgtttgagctccttatatattctggttgttaatcttttggcgggtgagtagtttgcaaatattttctcccattctgtgggttgtctctttacttcattgtttcctttgctgtgcagaagctttttttttagcttgatgtaatcccatttgtctatttttgctttggttgcctgtgcctttgaggccttaaacaaaaaaagtttggccagactagtatcctggagtgttttcccagtgttttcttctggtagtttcatagttttgggtcttagatgcttagatgtaagtcttaaatccattttgatttgaattttgtatatggtcagattgttttgttcttctgcatgtagttatccagttttcccaccaccgtttatcaaagagactgtccttttcccattgtatgttttagctcctttgtcgatgatgagttggctctatatggatttacacctgggttccctgttctgttcctttggtctgtgttttgtttttatgccagtgctgtagctttgtagtaaattttgaagtcaggtagtgtgatgcctccagctttgttgtttttgcttagtattggtttggctattcaggatcttttgtggttccatatacattttaggatttgttttctatttctgtgaagaagaatgtcattggaattttgatagggattgattgcattgaatctgtaaattggctttgggtagtattcaacaatatgaattcttccagtccctgagcatagagtatctttctattttttaatgtccacttcaatttctttcatcattgttttatagtttttcttgtatagatctttcacttctttggctaaattgattcctaggtatgttatattctttgtagctattgtaaatgggattgctttcttgatttctttttcagattgcttgcagttggtgtataccaacgctaccgatttttgtatgttgattttgtatcctgcaactttactgaatttgtttatcagttctaacaatttttttggtggagtccaggtttttctaagtataagatcacgttatctgtgaacaggcttatttgacttcttcttttctgatttggatgccctctatttctttctcttgcctaattgctctgcccagtacttccagtactatattgaataaaagtggtgaaagtaggcatccttgtcttgttccatatcttagaggaagggctttcaattgttccttgttcaggatgatgtttgctattggtttgtcatatatggcctttattacttgagatacgttccttccatacccagtttgatgagggttttttaaaatcataaacagatgttaaatcttattaaatgcgttttcagcatctgttgaagtaatcatggtttttgttcttagttctgttaatatatcacatttattgatttgcacatgttggaccatccttgcatccctgggatgaatcccacttgatcatggcaaatatctttttactgtgtttttaaatttgatttactagtatattgagaatttttgcatctatgtttatctgtgatattggcctgtagttttctcttcattgtctcctctggtgttagtatcagagtaatgttgaccttgtagaatgagtttggaaatatttcctcctcttcaattttttgaagagttcaaatagaaatttatattagttcctctttaaatgtttggtagaatccagcagtgaagctataaggtcttgggcttttctttaatggaagagtttttattatagctttgatctcattactaaaatggtcattttttttttttttttttttttttttggtaagtaaggatagatacgacagccaaaagagatccaaaacgggcaaaactggagccccaaaaaagaaaaccgattccgtagaatacataatttaaagtataatttaagatgtttcttttccttaaagaaaggacttaaatctattgaaaagacacaacatgctccagggaaaactggcgcaacattgagacatattctggtaaaaaatttcaactggcaaaagatcatataaagaaaatcaggttggtgcagaataacagaaacattcaataccagaaaatagtagaggaactacatgtcagctactcaaagaacatgtgagccaaatatttttttgtgctgccaaggtgtcctttgggtataaagactatgtactggctggtagttttaaacattcagggttttacatctttttatatgagcctttcttgaggaaacatctagaagacagataccagctaatcagtaaatgaaaaaggaaacttcagcaaaggaatgaactgctaaattctcaataattaactagaagatcatattagggatcatagtcttcctaattttaaagggagtactttaatgtctcaccattatatatataggctgctttctagatatctgtttatcaggtaatctatttactatgaattctctttttagtcacaagtggctgttgaattttatgtctaataaggcataggtttttttaaatctctcagtatgattaattttatgaataaattgtctaatgttacaccttccttccttgaattcctggcataagctttatctcaatcatgttgttttatattttatatatattgctagtttaggtttttctgattttttttttttttttttttgagacagtctcactctgtcacccaggctggagtgcagtggcacaatctcggctcactgcaagctccgcctcccgggttcatgccattctcctgcctcagcctcccgagtatctgggactacaggcgcccgccaccacgcccggctaattttttgtatttttagtagagacggggtttcactgtgttagccacgatggtctcgatctcctgacctcgtgatccgcccgcctctgcctcccaaagtgcgggattacaggcgtgagccaccgcgcccggcctctgatgtttttatttaagatttttttgcatgtgttgtcattggtgatgttaccttaaaatgttcttttatagttgttcctttctgggttttcattcaaggttgtgctagacttataatttgagaaagttttcattcttggccaggcgtggtggctcacacctgtaatcccagcactttggggggcccaggtgggtggatccacctgaggtcaggagtttgagaccagcctggccaagatggtgaaaccccatctctactaaaaatacaaaaattagctgggcctggtagtgggcgcctgtcatcccagttactcgggaggctgaggcaggagaatcacttgaacctgggaggcgaaagttgccgtgagccgagatcacaccattgcactccagcctgggtgacagagtgagactccatctcaaaaaaaaaaaaaaagaaagtttttattcttgagaataatgtttatgtgggaaaacttctgggcttgagacttacatacctataacaactaactctaccacttatttaatagttgtaggtatattctgttttcttaagtaggttttgataaattatttctggaaaattcccctgttttctctatgatttcaattttttctataaaaattgtttctattacccttataatttatagtacatataaatcacactcctttttatttgtaatgttggttttcagtgccttgttttgtccttgattaatttgactaaagatatatcaatattttttgtcaaaaagctaatcttttttcagctattttttcttcggtttaattaatatctgatcttctctttttatttcctcctcttatttgctttgggtttactgtgttgttccattttctgagttcttgaattgaccgtagcttattgattctttaaatgtttttcttttgtagtgtatacatttgaaatgaacagtttcttatagctattttagataatatcttaagcttagatcatgttactctttaacttatgaaccatttatatgtaggatttttaaaatttaaatttccaaacatgaggcttttgagattaactttttatggttacattgtcattttacttgattttggtcagagatcagttgttttttagtactcttggaatttcctttgtggccaaattcataaccattaggttttgttttggggctttcagctcaacttcattgaggtctaattttcatacaataaaatgaacataatttaagtatatagttcagtgaattttggtaaatgtatataccatgtgatgactacaccaataaaaatagtgtgtgtccatcaccccagaaagttcccttgtgcataccccacttgtagtcaattttcctattcctgccccctgctgtaggcaactaatgaaatgctttttatcactatagattaattttgctgcttcttgaactgtatatgtatagaattttacagtatgtactcttgtgtctgatgacttttgcccagtttaatgttttgagatgcatgcatatatcagttttactttttttaattgctgattattattatgtgtgaatatacaagtttatccattcacctattgatgaatattggagttgcttccagttttaggctactgtgaaaaagctgctctgaacattcatgtgcaagtgtttttgtggatatgttttattctcttgggtaaatatctaggaatagaattttgggtcatatggtaagtatgtgtttataagaaactgatgttattttttaaattggctatataatttttcagttggctttatatttctactaggagtgttccagaggctcctcatccttgccaacgcttggtattttcagtctttttagccattctactggagcagtagtattttattgtggttttaattagcacttccctgataactaataatattgacccatttcccatgtttctttttattatatgctttattttgtgaaatgtgtctatgagttttttatatattctaggtacaggtactttacaaatatttcccatttcttaataatgataccttggaagatcagatggttttaatttttaggaagtctgatgtatacatttttctaggtcactaattttgtgccctatgaaaactttatgtaccccatagtcaagtacattttttcctatgattttttaaattttataattttagccaaatagttatagtttttatgtttaggtctgtgattcattttgagttaaattttatggtttaaggtagaggtttgaggttcatgtttttttcctccgttttagttgttctgtagcagcatttattgcaaagatattctttctcaatggaattatactggcaatattgaaaatctgttatctggactctattctgttccattgatctatatgcattttctttgtatcattaccaccttgtcttgactactttagctttgtagtaattctcaaaatcaggtagtgagtccttcagctttgttctttttcaaaattgttttggcttatatctttcttatataaattttagaatcagatcatcagtttctgcaaactgagattgtgttgaatctgtagatcaattttgtgtcttaacatcccccagcaaagttagaaagccaggcagtaatatcagagggcacaagcccagattgaagctggaagacatagtgctccagaaaggtccttccaaaaaaaagaaaagaagctgctcaaaacagacaaaatctttgatctatctttatccagaggatattgttagttctctagaatttcaagctgaaataatgattggtaactgaaaattaagctattttaaattcagaaaagcaaaacacggtataaggaaagaacttgactacacagtatggctcagcaatgattaatacatacagttaagtagtgaaacctaggcctagcacggtggctcatgcctgtaattccagcactttgggaggccgaggtatgcagatcacttgaggccaggagttcgagaccaacctggctaacatggtgaaatcccatctctactaaaaatacaaaaattagccgggcatgttgctgggcacttgtaatcccagctacacgggaggccgaggcaagagagttgcttgaacccgggaggtggaggttgcagtgaaccagaatcaagccacttacgctccagcctgggccacggagcaagactccgtctcaaaaaaaaaaaagtaagcacccaacaaatgttagccattgttatcattaataacaatagcttccttgctaacaaatactaggataacgtctctatccatggcagcaaagaaaaaaggaatttgctaagttatctgatgccagtgcaccatgcctcatgcacagcaagccttcagtaaagttccttgtagagtcacaactgaaaggagctttagaaaggcaattataactaaaggaggccttagagagtataaatttaacaaaatccatcagttagtatgtcttcagcttccaataaaagtttaaacaataaggaacatttattatttcatgtataaagcccaaagatgaggcagcccccaggttagtttatttcatcagttcagggatctagtttctttctgttctgttccgttctatgttggctgccatcttggttgcaaggagatccaggcaacacatcttcagacaagatcctaggctagaagatggagtccttttctaagaaaggtttcccagaactctctctgtagacttccatttatatctcactggccagaactgagtcacatgtttattcctaaaacaaacactattcaaagggagtggaattaccataatgatcttagagtaattaagattctcattctctttctctctctctctctctctgtctccccccccaaccccacacacacacatactcactctccctcactcattttcacacacacacacacacacacacacacacacacacacacacacacacacttcttctgaaccatgggataacctgatacctgaacaaaattgtggttttatggaagggaagtaaaagggacatgattgttgggaagtcaatccaatgtgtctttaaccactgtctcaaaacacattagtggtagcacctagtgagttcaataggtagaccagaaccctggtctccctattcctaattttcccctacataaacaacctccttcatgaattattatcaacatagctacttttcctaaaaaattttgaatgtatccacacaattctacctccagttctttttggggggaaaatgtgctgtaaaactatacatgctgtttttgtgaagcatatgaaaatccttattccacagactcatgataaaaactgaaaacttgaccacctttgtaatctttttcttcgttcttattcttctctcccttcttcccttaatcagtcatattaaactatttgcagttcctttaatgtatcatgtttaaaccgctgttcatttgctcatactatttctgctatctagaaaatgtacactagtttccttttttggcttcctcattggaatatcttccagatttcaagtatctgtgcctccatgaaatctttcttgacatagctccatctccataaaattggttgtatcactgtacatccactatatcatgttttagatactcctacacatttatagtactaatttctttgcagatttttcttccttgtctattctgagctaacttgcttgctttctctttctttcctttctttctctttctttctttctttttctttctttctctccttttctctctctttctctatctcttccttcctccctccctccctccctcccttcctcccttccttccttccttccttcctttccttcctttcttccttccttcctttccttcctttctttcctttcctctctttctctctttctgacatggtctggctctgttacccaggctggagttcaggggtgcaatctcagctcactgcaacttcttccccccagactcaagccatcgtcccacctcagcctccaaagtagctgggactacaggtgcactccaccatgcctggctaatttttgtattttttatagaggtggggtctcactttgttgccctggctggtctcaagctcctgagttcaaacaatctgcctgccttagcttcccggcgtgctgggattacaggcatgagccacctcgcccagcctaatctgaacttttttaatgtagagcctgtttccctgtaatagagactgtttgccatttgtcttgataaatccaagatttagcatgatattggatgcataatagtcaccactaatagttttgtttaatgaatatatatacaactaatttgggggaggagagagatttttgtaaattgtgttctgcttgattccgttattttcaactagtggaataaagatgtggttctgtgatctcttcattttgaaagattttttttcagtaaggcaaaagcgattaagcataatatatttctgtgtacaaaattttctttagaagttaaagacttttggaggaaaaacatttcagattatgtgttatagcttatagaacaaattaagtccttagctgagaatacttgtcaaaggaggtaaataaatattacataattattcctaatacaaattactcagcgaacatttgtttctatagtaaatatgctataaatagaattgttcactttatgattttttttctttcttcattttagcatttatgacattaacagagaacaggactatgtcaagaattctgagggtatacttggtgaaaatgaattaagaccaccctcccagctacattctctcttagagaagatcgagacagggtccctatcagaaaagagtgggtattaaactaagtgctataagtcataactaatgaatccagaatagaatgattaaaatgtttttagttttaatttagatcatgtaaaacaaaaagactttaaaaaattatgatttccagtacctatattttttaaaataatcattagtccaaaagtaataggtgattaacttttcaaattgcaacataaaacacgtatgttcctctgttgtgattgaatttaacctttctcacatgctctttattcatcacttaagccctaagggatatacttaatgctttataggcaagcacttttcaagttttaccgtcttagatttttaggtttctttgtggtatagccccctcttcattttcatagtctggtaatcttgaatgtttaaataaagcttgagcattgctcagcagttatgagaccattcattcataaagtgtttgtattgtttggtgcactgattggactctcaaatgaaagtgtattttgtaaagaagggagagcgtcaaatttctagatgaaattttcatctgtctcctcatttactgaacaggaaacttgtgctttcttgagagtgtaattgatgtcattatgaacccatgaaagatttaagattagctatgattttccaacaactttgtttttaacatacctctgctaaccataaaatcactgcttttatgcatatactgctatatattgaagaatactggcctaaagtggaagcatttttaaccataaataaatagttctggaaataaaaatatatataagcaaaaaataatttggtacttgttcctcctccttcgttttaaatcattggctttatttatagctatatagggaacagtattccccacactggtgttaatgaagtgttctctgaccatgtatttgggaaaccctgtattagtgtttttaattgcaccatctcttcagttttcagttcattattgtgcattatgatgctcaaaaatgaggacgtatgtaacttaaatctgtgcctacctattaatgacttacagaatttagagaagttgataatcacagtcttcatttccagagttactttttaaaatatttctttcagtgtaaacaatgtgtttctcaaatattggtctataggtaattcaattttgaaactttcttgcttttttataaatatcaaatataaagttcccaaaattattgtttctaaagaaatcttgatttgtgtttaggctagcagtacagattatttgtaaaatgaatttgaaaatgctcaggtttgccagtttgttttgagtaatgcagctaataaagctttaattttaactcttataactggtgttttgctatttgcatctattcagaatatccctattttttaaagcactggtatattgaaggagaaagtgaaactgagcaaaagtaaaagtaaaacttagaatgaatatataaatcatgtatatcaacttcagaatattcgtaaacatttcattcttttctatttacagtctttcattttgatacttggaagtttattaaaagattttttaaatgccttgataattaaagtattaggacaatttagtctaaatttagcttactaaaatgtttgctttcatttctgagatagtctagtttttgtatattggttacttacaagttagttttaattgagattcttttttctctttaatttttgaactttaatacatttggcagttttggtaaaagtaggaagccatattactgtacttcataacatttatactatatgaccagtacttccagtgctatataaatcattctcttctccttattgtttataaatactaggtttgtaaaaccccccaaccttaataaagagaatagaaagagtacaaataggagagtgaacagttaaaatggttagatgcaagagtgtccgtaggtcattaggctcagttcttgctaaagtagagacttgtaaaatcaaaaggcacaaagagtcagtcaacataattactggatccagtcggtaattctcaattaggaaacgtgcctctcatgggaagggtgtatcacagtccctcaaagctatctcacatgggtatggtttgaaaaaagcaccttcaaaaaattgtaagtacagctctgttgtataaaatgaaagaaagtgattttataatacaactcacaggaagtaaaactcaatagactcttcttgacgggtgaggaaatcccagagatacaatgatttctattgtgtctggtgagtgggcaatagtaggtcccttaaaagggacctagctgacttagggatttaatgaaaatatgtaaagagtaagtttatcaagtgtggcgtatatatttaaaaaaaaaagaatagaaacaaaggatgaaaaaaactaaagaatgagaaattgctctaaaagtctaagcagctcctgaccaccaccttgacactacagttgtatccacttttgaccaactacagttatagtacacagctttcaaccaaaagacataccaggtctggcaggacatattttagctcctgtactaaaagtaattcagcttcagttctaatttatttaggttattttctttacatcagaggtcttttaaattttgttaagacagtacaaatatttcttagttatataggaaaggaataggtgatgttttgagtgatattcagtgtgtctcccttaaccccatcctttggaatcttaaatagctgcgttatttttgtttgtgttttacagtttttgagacagtgtccttgagttcagactctctcttccagagggcagtttcactcctccatacttcttacttggactcttcatctgagcatggttttcagtacagtcaagtgactttggtgaaaaatgacattttcttaaatgaggtgaggtgcttggtacacactatgatggttttgttttagttttaaaagaggtaaacccatcatttttggtatataagcctagcactttttagctataatttttcagacgcagcagatccttggaaatagtcacttggaaggtaattattctagggaatagaaaaataatgcatttatgtttagtcttaatggcaggaagaattcaaatgatgcatttttaaaaatttgcaagacaaaatagtatgtttatagcgtttggttattctgttctctctttatacagtacaaaactttttaccaacaaaaaaaagcaagtagttatactcaggaagaacttcaagacacttacgggtttcttctgtttgatactgaaaagcaggtaagggaattaggttgtagaaaattaatggtatcattagtcttaagtattgtggtacttcagttctgtaagagttgtaagattaccaattcatcagtgttttttgttgcttagtttggtggcatgtaaatgacagcaacaaaaaagccagtcatgaaggagatttgatttgatttctacaacttttcacggtttctctttagttttatctgaaatacatttgtaagcttagggtgcaatttggattaaaacagttttctttagtgtcaataatggcctttactagagtgaatggatatttttccattctggattatcgtttaatcgaaactttgtttcctgtggaaatttttctggtttaagttatttgatttgggagataaatcatgtaacttaataaactttggcatcctggttaactgaaattgcttcattcaatatttgaagactgaaatctgtattgttgcctgtacctaaattatgggagaaggaaaggaccgtgtacagggtaggtctccaaagatatgtatggcttccgagatacattttaaacaataccagagatctaaaataattcaaagttagtgcttcgattaggttaatggtttataaagaaggggggcagatttgtttagcggataattagcactaacatataataaggactatatagtaataccagaagagtttatcccttttgaaatttaatcgtctgaattcaaataacacgctctgggttcttactaaaaatgacatttggcaacaagacattttgaaatttcatgcttctaaagctgtagttggaaaataaatcttctagtggacttacctgtgaccctgcttagtttggttttcctgacatttttgttgattgaaatggtaaaattctatgaaaagtttgggccattaatcaaaatacagattgctttgcataagttttctttgtgccccgaatacctacagtgagcagactatttattttaaagcttatggattaggccagatgcagttgtgcctcatgcctgtaatctcagcattttgggaggctgaggtgggaggattgcttgagcccaggaatttgagatcagcctgggcaatatagtgagaccttgtctctattgtataataaaaaataaaattaaaaaaaaaaaccttacagattatagcattttttcattgcttcaaagactgaagcaaagtaatcttttgtttaaaggcaaaattggtatgtcagtgtggactccgtgttggcagcagtgctgttaccactctgggtgatccagccaaaggtaagtccgtaaagcaaaaagaatcttaaaaaaaaatcttcttttacaagatgaagtgaggtttcattagttttataagatatgtatattaaaagccagtttcattaaatgtcaaacagttcataatgtttagatttctaactttaaacatatgaatgagatttgagtctaaaacttaacagtatttttcagtgtcaagagattggtattgtcttgagaatctcttctaaattgtcacaatggcaataagaatagaaaatagagctgaccgaacttggcaactatggaatgtgaggggtaagagaggaaataatcaaatataagcttttaaacttacactacagtgataattattaatagaaaagaggtacataagaagagaagcagattggtagagaagctgatgagttaaaaataaaaatattatctaattgtcaagaacaatgaattagcactaacttttttgaagattcagtttcttcatgtgtaaaacagattaaactactttatagagttgttgagaggattcagtgagactggaaagtgtttagcccaggagtttgcacctagtaagttctcagtaaatggacagtactacttttatgagttgaatttgagaaaaagtgagattttcataagtgtttctgaaagatagcctataggtcataaatatagttgggaaagggatcagaactagatttggggctagggttgtgggagtggggtgtgaattgaagctaagacattgttagtgggatggcatggaaagagaagatggcaaaaacagaacttttgggtcattaatgggaccagggtgtggggaggtacagcgaggatagaacgaggaattgtcaagagcagtctgttacctggagacttaggaaatagagtttcacggaaagcagaaagatctcacgaagaggggtattttttattagtgccaggtgctatgtagaatgtggagatcagaactgagaaagattatcgggcttcatggctagattcctgctgaccttttttttttttaaaaaaaaactgctttattgagatataattcacaattatagaattcacccattgtttagtgtagtcccatagttgggtaaccatcataacagtcaattttagaccatttttttcacccaaaaaagaaatcccatggccattagcagtgactccccattctctaccatctctgctctaggcaaccaccagtctattttctgcctttatagatttgtctattctagacatttcatataagtggaatcatatcatatatggtattttttgagtaacttcttttagcatgtttttaaggcatattgtagcatgaaccagtagtacttcattcctttttatgattgaataatacagtcctgcagcacttaacaatggggatacattccaagaattgcattggtaggcagttttggttttttttttggtggcggggtacggagtttcgctctgtcaccaggctggagtgcaatggcgcaatctcagctctctgcaaccttcgactccttggttcaagtgattctcctgcctcagcctcctgagtagctgagattacaggcacacatcaccatgcataactaatttttgtatttttagtagcgactgggtttcaccatgttggccaggatggtctcgatctcctgacctcatggtcagccctccttggcctcccaaagtgctgggattacaggtgtgagctaccctgcctggccgcaattttttactcatgtgaacatcacagagcgtacttagagacacctagagggcatagcctactacacacctaggctgtatggtgtagcctattgcccctaggctacaaacctgtacagcaggttactgtacggaatacttcaggcagttataaaatagtggtgtgtgtttgtgtatcaaaacagaaaaagtacagtaaaaatatggtattacaaacttacgggatcactgtccaaactttatgcagtctgttgttgaccaaaatgttatattatacaatggtgtattctgttatgtggccataccatattttctttatccattcatcaattcatggacatacgggttatttctacttttgggctattatgaataatggtcctatgaacatacatgtacaagtttttgggtggacataattatatatatcttcgatatataatgagtggaaccactgggtcatatgataactataaaacaaaaaaatttaaagtttacattcaactcatcttctaagggacgttaaaagtgataaattcataacgctgataacactgcatacagctttttttcttctctcctattttttcaccccaccctcatttcattatgaaaaattcagacataaaagtaaagagcataccataatatacctaccaccgaagtttagcagataatattatacattattggctgggtacggtggctcatgcctgtaatcgtagctcttttggaggccacggcaggtgtatcccttgaggccaggagttccagaccagcctgaccaacatggccaaaccccgtctctactaaaaatacaaaaattagccaggcatggtggcatgcacctgtaatcccagctactcaggtggccaagactcgagagttgcttgaacttgggaggcagaggttgcagtgagccgagatcaacagagcgagactgtctctaaatataaatgtatataaatataaatatatatatatataaatataaacatacacattgcattatttgcttcatttgtttaattttttttctggagaatctgaaagtaaattacaaataaccactgcagcttacatctcaaaaaaaaaaaaaaaaaagacgttttcctacattgctacaatcttacgatttcattgctgatgtttgagaggctggcttcagtagagtggtggaagtagaaactggatttttcctgacaaatacacattcttcaaaaacacatacactggggttgatagtaaaattaacactactacttgtatgtcttttgtaatttttggcttgactagaactggataattttgtgtataataatactttcaattaataatagtttttaaagcttattgatcttttatatcttcatgagcaccctgtggtctttgtgtctgtgacccaggcccaccctccctacctgagtgacttattcttacctggaacccaagcttctgaccacagaattagcgctctcttccactgtatcagttttctcactcattgtctcttatgtttcgaaagagttgcctcagttgaggaatagccctgaagcctgtcctttcttcctcgtttttcactgctgctgccttgttggaatcctcctctcctgtctcaactatcacagtagctttctttctaattggtcttcttgcttctactttctcctgtctgatgggcaatctgctgcttaatctatattttatacttttacaggtgtatacatttccaaatactccgactgtcttcattcaagaccatggtatcatgggaaatctggttatgttgtaatttttaatataattaaggtaaagcttaaatgtgctgttacgtgatttccttttaaagtttaaggttatctacctttgatattctctgtagatattagttgaacatagttctcaccaaagttagctatccaaattcaggaaaagcaaaactatttttccttttctttaaaaagaaaactttgattcatttactagattgtaaacttttttttaacttcaaaaataataaaagggtatgcagggaaaaatcttcctctcacctgtcagagctactttttaaatatgaaataagagaaaacaagtagctgcttataaggtgatgtgattacacttataaaagatgaatttagaaaacaacattcattgtctaatttaaatggtcaatagaatctttattttctttctccataagacatccagcttcacagcttcatgtgctacctagaactgatgatgccacaaatccttaaatgtcctaaatggtactgttaagtgaatcgtgcaattagaattttcacccaaacagaagggaaactgattttagatgtgattgggcttcttgaggacatttctgtggtctcgttttattgtttttttttttagctttgttactatcttaaattctttggttatcagcctagcactaaatgacctttaattaaaaaaaaaaaaaaaacaagagcctgtgaattcttaatattgtaaagtttgttctcaaaaaagcggagggagaggccaggctctgtggctcatgcctgtaatcccagcactttgggaggccgaggcgggtggatcacctgaggtcaggagtttgagaccagcctagccaacatggcgaaaccctgtctccactttttatactaaaagtataaaaaaattagcctgacgtggtggcgggtgcctgtaatcccagctacttgggaggctgaggcaggagaatcacttgaacctggaaggcggaggttgcagtgagccaagatcacgccactgcactccatcctgggtaacaagaacaaaaaactctgtctcaaaaaaaaaaaaaaaaagtggtgggggagtaacattgctttgaggtacaatcactagttttcctcccttaatctttcttttcttgctctgcgatgagtgctgcagaaagtatgcctactaatgcagataataagcatttcgttttttacttagattatgcctcagccttgatttcttgccactagctggagattgctgttttggcctctgtgctctcaatcttcattttatttcacaaaatcgagccgcacccagaaccataaaatgtttgatgaggagatggtagagatgattggttactgataagtactatttacattttttggcttggtggtttggcctttggtgggtctgtaaatgaagaggcaggacttaaacaacaacaaaacatcttcttttttaaaaagtaactatattcttcttataaaaattaaaattgcctatagtcccatatcccattttgatataagttaataacatcttgtgaacattgtcttatgtcattgtattattcaaaacagcttttaaaatcattgcatatttcatcataatggtaaacttggcttacttgctttttatttttttgtttgtttgttttttgagacagagtcttgctctgttgccaggctggagtgtagtgacacaatctcagctcactgcaacctccacctcccgggttcaagcaattttcctacctcagcctcccaagtggctgggactacaggcgcgcgctaccacacccagctaatttttttgtatttttagtaaaggcagggtttcaccatgttggccaggatggtcttgatctcttgatctcatgatctgcccgcctcggcctcccaaagtgctgggttacagttgtgagccactgtgcccagctgcttgcttttttctttttttttggagagacatgtaacccttgatggagagaactctgtaatggaaaatactgctgactgttcagcaaccaggaccagctgcctgctaagaactttgctacatatttgctccttgttaacttgctgggccctgtcataatagaagtatctcagtttataatttacaactgatcatagttcagattggaaactcatcttttgaaattttagattttgtcctcttttacattacagtcaccaaagagccattcagtgaccgtaacataaaagatggtgggctatagtttttcttttaaggaaatggctctcttaaatttagggtgattcgtatatttctttgatattgtgataaaaactatggatatttgtctcagacgcccaaatgtccaaaatttttgagtccatttttaagggttcatggataatcaaaactatttttggccttaagataattgtttttctaagaagtatagttcttaatacagttactgttaggggacacatatctgcatccttgttagactacttctaaatgaatcctagagtaaaggttattgctattcgaaggcatctgattagttttaatattttcattctagggaaaagtcaagtttgtgtctgagaattatacaactaactatactaagccatcttctggctatgattgccacgtgtctgaaaatactaacaaggtttctaacaagacgagtcattttcgtgcctttgaactgagtcaggtatagttacctgtgaatgagtaacacccaagatatatttctgactctaatgtgttaaatttcagggctcggtggggttgagaaaaacttggtacatatgcagttccatagtgctaccctgataatacttatttttcctctttcagtattacttttacgaactttcaggcaacaccgttattgaacgacccagacagatctgtccttatgtaattgtagcttttcgatacagggaatctaaaactatggcaccaccagctcataaaagcatgtaagtaattatgtgcatgctttgttttactgaatttgttccttttactcttgtaaacatgttctttttctttctttttctgctagacttgaacgcagtgaaaatggtaagaaatagttcattgattcttttaggttttttttttcttgagtaaatgtttcatcataaataatcagtttcttttttaccttcatttcttcagttctcatgtctccatggaaagggaaattaattgttcaagaccgtatgctatgtgatatagctctttggtccacttacggtgcaatgattccaacacagctgtaagtattaaatgttatgtcctttactaatgcttatattacaagttttggggttttttttcctcacctcatttcaagggtggcattggtgtaaaatacagcaactgttcttgattttagatgagggtatatttgggtaaatgtatagcacacagggtatgacatagtaaacctaaattctaatttattaatgggaaaatgacctcttgggataaattaaactattagatactagaaatttgaccttccccaagaaataaatcagatttgcctgatagcaaatatagcagattatagccacttaatcgtattatttttattaacatttgcagtatctgattttcaaattttaacatgattttcttagaaaaatgttagaatagctgttacatgtatttacattaaaagcaattatcatgattaatattttctcctggggaactgtgaagaacatcttaggaaatctttttggttcatcctgttcttagtttgtacccaaaaccattaagaaatagtcatagtttaattgaattataaggtgaaaactgatgtgttgtgaggattcatttttttttttcctatcggccttttttaagaagaggtaggagtataataacccacaacataaaaattatgtgaataagcaaatagagaagggaaagttcttcctcattatagagtgcaactaataaatgtggaaagattgataaattagaagatcagcatttgacaacaccataataatcaaccagtgtgtgctaaaaacaggtgaaagtttaatagtatttgcatatcttacaacatttccccactacttgcttattaatcacaaaggaaacaatgcagacttaccagtggagtaaactggcagataccatcttaactcagcagttaagttaatgatagacctatcctgattcaggagcattctgcaaaatcgtctatatttttcaaaataccctagtcattgaagtaaagaaaagactgaaaaactgttccagattaaaggagactaaagagacgtgattactgaatgcattgtggcatcttggattggaaattgttttctttttttgtgaaggaacttagtgagacagttggcagcatttgaataagatgtaggttaagtcatagtatcgttatcattgtgaatgtgttgattttgcttattgctttggggttgtataagaaaatttgctaggggccaggcacagtggctcctgtctgtaatgctagcactttgggaggccaaggcaggaggattgcttgagtccaggagtttgagaccaacctgggcaacatggcgaaaccctctccctaataaaaatacaaaaaattagccgggcgtggtggcacgtgcctgtgatcctagctactggggacgctgaggcaggagaatcacttgaacctgggaggtggaggttgcattgagctgagatcgcgccactacactccagcctgggcgacagagtgaaaccttatctcaaaaaaagaaaagaaaaaatttcctgtttaaaggaatcacacagagaggtatgtgacataaaagggcatcaggtttgcatcttactcccaaaaggttcagaaaaaaataatgcgtgtgtatagagagagagaatgacaaagcaaacatggtatactgttaatatttgggaaatctggatgaagggtattaaagagttctttgtcctatgtttgcaacttttgtataagtgtaaaagcattttaaaatgagtttttaaaaaggaaacagagtgccgggcacagtggcttacacctgtagtcccagcactttgggaggccgaggtgagcagattgcctgaggtcaggagttggaaaccagcctggccaatacggtgaaacgctgtctccactgaaaatacaaaaattagctgggcatggtgcggcatgcttgtaatcccagctattcgggaggctgaggcagggtaatcacttgaacccgggagtcagaggttgcagtgagctgagatcgcaccactgcactccagcctgggtgacagagccagactccatctcacacacaaaaaaaggaaaaagtagtcaggaaataacttttttttttttttttttttttttttgagacggagtctcgctctgtcgcccaggctagagtgcagcggcacaatctcagctcactgcaagctccacctcctgggttcacgccattctcctgcctcagcctcccgagtagctgggtgggactacaggcgcccaccaccacatccggctaattttttgtatttttagtagagacggggtttcaccgagttagccaggatggtctccatctcctgaccttctgatccacccgcctcagcctcccaaagttgctgggattacaggcgtgagccaccgtgcctggcaaataactcataaatagcataattttttttaattccttattcctgtatacataatttttttgacacatctagatactttgtctgtactgaaaatacatgtattgagaagatgtgaacatatttgcagaccatggtttatgggtcatatatttgaaaatctgtactacttaaaaatacacatattatttaacctggagcttatcaacttaaggtcttttttgtggttatatttttgtttacatttatattagaaaaccaaaacttaagaaaatttagatccactgtttattattctgcttgatactgttgtgttgtttttcagaccgcaggaactagattttaaatatgtaatgaaagtgtcttccttgaaaaaaagactaccagaggctgccttcagaaaacagaattacttggaggagaaaggtctgttgaaatgtaataacacgctacttgtcctgggctttgttctggttattttctgctctcttccaaacactcacacatgcacacttctgtttcatcataagtgactcttaaaagagtcttttgtaagaaagctgtagagttactattttcttcagttccttggaggccaactagaaactgaaaggtagtttcatctaagatgacaaaggctagctttaatatagaaatactgatgcaattaagcaagcagatattaaaagcatttggaaacttgtaactattcctctcgaggacagagtttttgttggttttatttatagaggtacttttaaactcaaagaaaaaccatgagaaggaaatttcttggtcatttaggttaattcatggagcactgatgtttattcatgtagtatttgtatttgtcttgttaatcctatagcagtgtcagtataaataagagcattgttttaaaataactattttggtgatgttttatgagggagttttataaccaagaacagtaaatgataaaggtttctgagtagtatttctattctttcatttttgcaacatataaaatgaacaaattgactgtaagtacataatagcgtattaaaaataagaaatgtttttctggttttctctacagtctgttttcaagatttgtgcttcaatttgtatgaggtagaactgtcaaacagacaaggggaaaatatagataaattaacagaatgtattaaaaacaagcaattggtaagcatcactaatttaaaatataattattatgtttttctttaattgatatatattagttgtgcctagatggcacatatatatatattatatatatatatagatagatagatagatagatatagatatagatatatagatatagatcgatatagatatatattagttgtgctgaaaggagtttcatgtttaatatttatttatatattattaatgtaatacagtatctgtggggtatatgttccaagacccccagtggatgcctgaaactgtggatagtactgaaccctatgtatactgtgtttttttctatacatgcatacttatgataaagtttaatttataaattaggcacagtaagagattaacaacaataataaaatggaatagttacaacaatatactgtaagaaaagttatgtgagtgtggactgtccatctcaaaatattttatttattatgctatacttgagtactccttgtgatgaatgaggtaggtggtgcaggcattatgaagtactactattgccccagagggtgggtagcatctacagcatagatacactggacaaagggatgattcacggccaggcgtggtggttcacgcctgtaatcccagcactttgggagaccaaggcgggcggatcacgaggtcaggagatcgagaccatcctgactaacatggtgaaaccctgtctgtactaaaaaattatctgggtgtggtgatgggcgcctgtagtcccagctacttgggaggctgaggcaggagaatggcatgaacccaggaggcggagcttgcagtgagcctagatcgcgcagctgcactccagcctgggcgatagagcaagactccatctcaaaaaaaaaaaaaaaaaaaaaaaaaaaaaaagattgattcacatactgggcaggaggggcaagaagcaaggatacaaagtagtgtagtccctaaagtctggcatggtggaacacatctgtaatcccattactttgggaggccaaggtgggaggatcgcttgaggccaggagtttgagaccagcctgggcaacatagcaagatcttatctctaccaaaattaaaaaactttttttttttaaactagccaggcataatggcctgcacctgtagtcctggctactccgaaggctgaggtgggaggatagcttgagcctgggagttcaaggatgcagtgagctgttactgtgccactgtgctgcaggctgggtaacagagtgataccctgtctcttaaagaaataggctcttaaatcatagctcctgtaagtcaaggagcttaggagactatggaggagacaaatatgtaagtcatcatgtgacatacaacacataggggctctcatagaatcttgttgaaactcaaagcagtgattctttttgagagtgagatattagtgtcataccttaattgtaatgtaataatttaaaaagtcttattttgtatattcattgtgattaaataatatattgatttatatttgtagccttatcacctctcagttttgaaataaaatgttctgtaaaatggtatattttatttaggtggtttaactgaaaaattattgtactaatattggattttatcttttatgtgtatatagatttttgaaatggtaagcagtggaaaagaaaaactattaaattcatgatttagaacaacagcttttagacaacttctgctgcctggggacaaaactgccccagttactgaaagcattaaaatttcaagacttttttcttgagctcaagagtccactgaagactctaatagaggggaacaaaagagaggaagaatttattttcatctgtatttcttgttgccctggaacttgattattttctgttattttccatttcttaagatgcatagaaagaagtattctattggatggtatcttgcagtctttttagattcagcgttttgggataattttcatgtaaatatgagcttaagatgctacttataggtttgattcatcgtgagtttataatgactacatggtaacatattggctgtttaggcagtggtatgaaatgtcagctgtctcagtgaaaaaaataagtcttttctgattgatctgccatgttcttgagcactgttctaaaactaacctttcatgttctggttattttatatagacccaacagggccaagattatttcagctaaggaacttgaagtttctgatactggggacagaattaccctgattcccataacatttgcagaattttttcttttcttgaggtcaatattcactaatgagtatgggtagagggagaagagagggattgcagaatattccttcagttgaatttttcctttttatttaaggcaatcatcaaatgcttagaagatcgagggtttttcattttacttacatcatcagccttactatcagaaccaggtatggagaactgttttgggaaaaaatatttttcattatgtttacttttgctttataagatcaacaacctaacttttcttcttctgattctcattctgcatagattttggaggcaagcagatgggtctgcatgggttacatttatttcgttcacccctgtcaacaggtgaggatacaatggtttccagctcactctgtctgttggatatatttagtcctcatctgacttgacctctcagcagcacgtgacactgttgactgttttttcctcttaaatacctcttttcttaacatcactggttcacccttcttgacctcccttgtaggtttatgcttccctctgagcctcagtcccatatctccacttgtctactgacattgccactgagatatctcaaaggtgccttaaattcagcatgtctaaaactgaattcatttattattaaattttgccatcgtctctcctgtaaatatgtctcagagtcttcataggtgctgttctccttatctggaccttatctgttagtccttttcatatcaagcccatacatttttattgtgatgttgatccacccagaggaccaaaatttggctcctgggggcaaaaaaaattactcatacagtgcataaacagatatgcagtgtatatctggtattaaaattttggaggtcaatatgggggaaaaatgactctaagagggctgggaaggaggatgactaaaaagattgagaaacactaatctagcttattcttcctcctatctgtcaaactcggcttcactatcactttctttgttcccgtcaacactctttgctcaccttagactcctatgcttatttatcattcatatagtttaaatatttatttgtataattatttaatgcctacccttcttgtattctactgtatccctagtgcctagcaatgccaggcacctataaaataataaatatttgctaaacaaataaataaatgagagttgaccagtcacggcagctcacacctgtaatcccagcactctgggaggccgaggcaggtagatttcttgagttcaggcgttctgagaccagcctaggcaacatgttgagaccctgtttctacaaaaaatagagaaaaattaggcgtggtggcttgcacctgtggtccaatctccttgggaggctcaggtgggaggatcgcttgagcccgagacgtggaggttgcagcgagccaagactgtgtcactgccctccagcctgggcaacagagtgagaccctgtttcaaaaaaaaaaaaaaaaaagtcactttgttgtataatcacaatgtgtgtgtttaaacataaaactctatatagtatttataaagctataaccaatataaacatgtttttaaagtttttttaaaaaattcagttactggctaggcagggtggctcacgcctgtaatcccagcactttgggaggctgaggcgggtggatcacgaggtcaggagatcaagaccatcctggccaacatggtgaaaccccgtctctactaaaatacaaaaaattagctgggcttggtggtatgtgcctctagttccagctactcaggaggctgaggcaggggaatcattggaacccgggaggcagagattacagtgagcctggtgacagagggagattctgtctcaaaaaaattaaaaaaaaaaacaaaacaattcagttacttgaagcagaacgctgtgctttcctaggcatcacatctttggaataagcaaaacattacccatgataataacataattggcagcgaccgtttgcatttttcaagcatttatcatgtcaggttttgtggtggaagtaatggacttagcaatccataaaataagtactcctataacgatttcaaagatgaagaaactcagagttgaacttgttcagggtctaacagctaacttcagatctggctcctgtaagatttctaatttcattttattttatttttgttttttagttgtaaactataaagtttcaggtatttcattaaaagattttaacaaagcgcaagtttaaaattctcacataaatatgatatgaacttgctaactttttgcctatatttgtatcaggtgaagaagaaaaagagtggccgggcatagtggctcacgcctgtaatcccagcactttgggaggccaaggcgggcggatcacttgaggccaggagttggagactagcctggccaacatggtgaaaccccatctctactaaaaatacaaaaattagttaggtgtggtggcacatgcatataattccagctactcgggagactgagacacagaattgcttgaacccaggaggcggaggttgcagtgagatgagatcacaccactgcactccagcctgggtgacagagcaagactgagttaaaacaaaacaaaacaaaacaacaaaaagaccagagcaataactttaaaacaatttggtttataaaaacgttgtgcccggagtggtggctcacgcctgtaatcccagcactccaggaggctgaggcaggtagatcacttgagcccactcgttcaagaccagcctgagcaacatgacaaatcccatgtctacaaaaaatacaaaaatttttattttgatatctggccacattttcctttttactgttatttgtccttcatttcctttttctaataactgctttagtgctaatgtatttaactagaactaactttgtgtttcattctgaagttacttttctttaaaaagaatggtacaatttttattttcacttactaggccctgaaggctgttgtttcttgtggctttatattactgacaactctgaaattttataggattttattacccagttcatagggaccagaccttttctctttttttttcccttttactgtttcctttattcattttcaaaaaaaaggaaaaattagcacttcagtcaaagcaggagaggaggtgaaacatagactagtcagttttagaagtttttatttcatttgctagaaaaggtgataaagttagcaataatcattccagtgagattccagcattatttagggcttctacttttttcagttcagttgacttgcactaacttctgaaaagaatttgaagtgagttcagtaaggtacagctacagtaaaataaattttaaaacaaaataagaaaaagtacgaaagcaaatctgccagctctaaagaccagtggtactgctgtgatgaaccattgagctcatgagctccttgttaggtgagatggagctggaggcagggtttagtttacttgttctaacctagtgattgcatgtcagatgattctttttcagttcagtgtgtgtgtgtatgtaatttcaagtatatggagatacatttgttaaatgtacctctaagtcttctattaattgccatttaggttgtcatttgaaatactataacatatttaaccatcacataattttgaaatctaaagcttttttttccagaatgttttgtttttaaaaaataaacttcagatgtttaatacgtgtgtatatattctaggggtgaaagatttgaaagttgaagatgacatctcaatgaaggtgatacctattttatctacccttaattgtgccctgctagaaacaaagaaatcacttcctgaagaaagaatccatccaaacacattagtaaagcgtcatttccaagaattgtacaaggcggacagaagcccttcattgagtgttgctcctcaggatagaatgaaagaccctacattcttggggaaactgcccagtggttttgacttgattcctccagctgaaaagtgcccttcagagtctttaactcagttgaactcttatttttcagaccctagtgcttacattttggaagtgtctactgctttggacttgctagcagagcatcctcagtctccttgtgtttcagacggaatttgtgatgctggattttccttagttatgactccagatcctgaatttcttgtctcagaggcagaagtgagaaaagaaactgaaacaaaaaaggattctgaagaaatgttgaaagcaaagaagagagtttttccattgagtccagcgtcaaatctgagagtgcagcctaagaggaaggccagcatgccccacatggtgcagagtaaaaaggtgaacttgtgccgcccctttcccaaaagaactgcttccagagcagacaacagctcggactctccaacaactcttaagttagttaaaggacagtttcctcagaaaagaaaaagaggtaagcacgatttatttatgtgggttattataataatagttgtggccaggcgttggtggctcatgcctgtaatcccagcactttgggaaaccaagtgggtggatcacctaaggtcaggagtttgagaccagtctgaccaatacggtgacaccctgtctctactaaaaatacaaaattagttgggtgtggcggtgcgtgcctgtagtcctagctactcggaaggttgaggcacaagaatcatttgaacccaagagacagaggttgcagtgagccgagatcacgccattgcgctcccgcctgggtgacgagcaaatctccatctcaataataataatagttgttgtattcgatccctctgctgtcttggtccctgtggactgcagctttgcagcatcagttagaagattgttagaatcaccatcatttctctccaggcaatttgtgtgcctcctaatgcctgacaagctctgattgagatagcaactgaaaaccaagaaataggaaagaccaagatacctcaaaagcctacccaccaccaacatgttatgttccacatgtaaaaccacccacacgtgtatgttccattctaagaaagacaaccatctagtttctgtgccatcctcttcacaaatggaggtagaaaaggttcttctaaaatcaggcacatcagtaccagcaaaccgtgatagctgacagcctcaacacctatcgagaggagggaaatgcctgggacctccaaaagtaaaatagtctggggcagagtttctaatcctttatgtgtatcacagagtttttacgtgagcacctggattattcgtgtggttttgatgctccctgaaaaattgagtgagaattagagtcttgagctacttagtgtattggcagatgtatttcagtgaacatagcacagcaaaccatatgactttggcctagccacttaatgtattggcaaatgtatttcagtgaacataggacagcaaatcatatgactttggtttagagtcatctcaaattgtgttttactctattttctctaaaagagtagggaagtatatgggtgactcctttggagaagaaggcagcacattatggccaaggggccactcggttgtgcctgtgtcgtctctggctgctctcatgccgtgttggcagagctgagcagctgtgacagaagccacatgaccttcaaagctgaaagtatgtactctatggcccctcacagaaaagtttgccaagccaatctgtaatattttgaatttggaaatgttggtgcctaaagaagaaacgtctagggtatggtaatcccaggattctaaataattcagagtttaccctatggagttttttttgtttggagttttctgtttttgtttagaaacaggatctctctgtcagccaggctggagttgagtgacatgatcatagctcactgcagtctcaaactcctgggctcaagtgatcttcctgcctcagcctctggagtagctggaactacaggggtgccccactaatttttaaaatttttttgtagagatgacgtcttgctatgtttcccaagctagactttgaactgatgctcctgcctcagcctcccaaagtgttgggattacaggcgtcagccactgtacccaaccttggttttatcctgtggcttcataaatagtggtttctggcttattgtggcttgaggaacggggtggagatgtgcgtacttaggagggtaagtggaaagtatggtagtataaagcagtgcaccagactatacaactatctgtaaaacagattccaggccaaccatactgttctgcatgaaccaatttaaggtattgaatcagttatctataactcaacataaattgtcactgtttctcagatgtttttaattatatccactgtaagaaatatgtttgatattatattccggtacctacaagttcatacatgactggaacaaaaatttcaaaaaaaaattatgtgtaatacagtctgataccttctattctgtttcatttaagagttctgggctgggtgtggtggctcatgcctataatcctaacactttgggaggctgaggcgggtggatcacttgaggccaggagttcgagacctgcctggccaacatggtgaaaccccgtctctactaaaaacacaaaaaatagccaggtatgggggcacttgcctgtaatcccagcaacttgggaggctgagacacgagaatctcttgaacctgggagggagaggttgcagtgagctgcactgcactccagcctgggtgacagagcaagactgcatctcaaaaaaaaagaaagaattctagttgtgacacattgaatttattttacaacccaccagtggattaattgcattcagtttgagaagcatggtattgaatgttacatgtaaacaaaacaatctatgcaggatcactttgtttcatttttcttttttctcccaacacctgggagtacttgggaatatcttccttttctgtttgtacaaatattagaaagtttccccctgggtcttggttgtctaatctttttctttttaatttagtcttaactgttttcctgatttatttttattttgctcttccctatgctgaagattttagaaaatgtaattagagtgtaataagaagtcttattgttaaaaaaaaatacgctgctttagtacttattaatataataatttggtagggaggaagataatcagacttgaaatgtacagcattaagatattctgaaaacatttttaaaactattcatttcgctaacccccaaaagaatgaaatgaaatgggtctccttttttctcctacatttcactaacactgatcagtttcttaaactgtttaatatcatttttagtgtccttagtgagaagtagcgtcttctgtataatgtaatttaaaaatatttgccaacattaaatgtgtgattatttcatatgatatctttgaggcttaattttaactcttaaaagattgaaacactttctgttgtgcattataagcaggtgtttagtatttcctttttcttcccatcctttagctccacctttagctatttttatgccatgtgagaagcaaagcagagcgcttctaagagacaccattgtgtaagatagtagatttgttagaaataaaaccaggtgcacactttcctcaggcttcccagagcgcttctaagagtcatcattgtgtaagatagcagatttgttagaaataaaaccaggtgcacactttcctcaggcttcccatcttttaaaagattgtttttcagatggtattaaaatttagatgtttacaagtagtaacgtaaaatatataatatggctctccaaatatattgctgtctatacaactcttctctgcagtgtggttatagttttaaccacttcaccttatggaagctgtgctgctgtttgtttaaacagaaatatctatatcctggggctgtgatctagcatattcagtcttacctgtcacattagtcaggaaaggttatgaagattttttttttttttttttttttttttttttgagacagggtctcactcttgcccagcctggagtacagtggtgtgggctccagttatcctcccaccccagcctctcgaatagctgggactatgggcacatgccaccactccttgctaatttgtttatttttttgtacagtgtcttgccatgttgcccaggttggtctcctactcctgggctcaagcagtccgtccgtcatggccccccaacatactgggattacaagtgtgagccaccactcccagcccaaagttttgtttgtttgtttgtttttctttttttttcagttgttacaaagttattactctgatctttttcttcttcatctgatagggatataggcagacacttagcaagttcatattatatttatgtgagaatgtttaacttttgatttgttaaaatcttttaattaaatacctgaaacttcatagtttattccccattactaaagttactgtccccaaaataaaaacaaaacaaaacaaaaaatggaaaagctatgctaagtatctgggcccctaccccttacaaaaatgatgtcttttctacataaggtgcggaagtgctgactgcacagtttgtacagaaaaccaaattggataggaaaaaccaagaagctcctatttctaaagatgttccagtgccaacaaatgctaaaagggcaaggaaacaagagaaatctccagtcaaaactgttccaagggctaagccacctgtgaagaaatctccacaaaaacagagagtaaatatagtaaaaggcaatgagaaccccagaaacagaaagcagctacaacctggtaagaaatactcttcctataaatttaaacaccccaatacagatctaacagagagtgcaagataatttattgaaatagtgtaagagcagttgcaatgtcccaataattttttctgtgtttttcagttcagacattaaaaaaactaagtaaactggtttcctaatgtaaataaattaggaaggtacaaaagctcaaaccttcaaaaacatagagcctactttttactttgcaaaaagcctgaacatgaattgtctacaagcattaaagtataaatggccttatttatgactaaatgcagaagcaagtagtatctggcattatttttctagaccattatcaattataaaaatagaagattataagtttatctaaagggaattataaacagactgtccaaaactgtcagtaatccagaatcctgtatttagttttatttatttagagacagggtctcactttacaatcactgcaaccttgacctcctgggctcaagggctcctcccacctcagccccctcaaatagctgggactacaagcacgtaccaccatgctcagctaatttttttgtatttttttacagagaccaggttttggccaggcgcggtgtctcacgcctgtaatcccagcactttgtgaggccgaggtgggtggatcttgaggtcaggagttccagaccagcctgaccaacatggagaaaccctgtctctactaaaaatacaaaattagccaggcgtggtggcacatgcctgtaatcccagctactcgggaggctgaggcaggagaatcgcttgaacctggggggcagaggttgtggtgagccgagatcgcgccactgcactccagtctgggcgacagagcgagactccgtctcagaaaaaaaaaaaagagagagagacggggtttcaccatgttgcctaggctggtcttgaactcctgagctcaagtgatcctgcctggctcagcctcccaaagtgttaggattacaggcatgagctaccatgcctggctgagaatcctgtatttggttttaaaaggcattaattttaaaagtagttttactgatttaactttgcttaagtaaagaatcaagtttagtcacatgaactgctccagttttgtattttcaactgctagatataacctctgtactagaaagttttgttgtcaccttagtgagacaaataccagctttcctcctggatctactttccttaattttttttccctttggtattgatttttttgtggtgtgtgtgtattttttttgttttgtttaacggagagacttcattctctcctatctttctatgagttttctgtctggttttcctgattctactttctccctcatctattactagatgttactatctcacagagagtgagaattcagagaaagaaattggattgttgttttgttttgttttgttttgagatagaatctcactctgtcaccaggctggagtgcagtagcacgatctcggctcactgcaacctctgcctcccaggttcaagcagttttcctgcctcagtctcccgagtagctaggactacaggtgcatgccaccacgcctggctaatttttgtatttttagtagagatggggtttaaccattttggccaggatagtctcaacttcttgacctcttgacctcatgctctgcctgcctcggcctcccaaagtgctgggattacaggtgtgagccaccacgcccagccaggtttgttttttttagtttttttgttttttttttcaacttaagcataccctgagattctttaagttttttcagattgttttatgactgaagatttttttaaaagctcatcatgtcattcaaaaacccatatgctgcagttttggcttccataccagatttgagctcttctgcttgtccctctcgggagtttatggtgtggctgtacctcccctctctgcgttgtgcctctgctgttgccaccgtgctccttcccctgcggccctctgtgcctcccccaggcaacctctgcccttcaggggcctgcagctagatttatccccacagggaggcgttttctcatgttgtgactgtaactaatctctcacttctttgggatatttgagaacattctataatttaattcatactgttttcaattcatctgacatgtcttggtccaatctttccaatttgtaaacatgagaataggtaacatcttgtgttcctagcagtgtcatttgcattctttgtactgaattggcttcagatgtttattgacaaattgattaatgcgaggaggtatataattgcatactggcagaaaagtgagcccagaaaatttaaagtttcaaaatgtgtgttcaaatacaggctgatttgtattgcaaatgtctgtaggtattgtgcagccacattccaagttaacatttttgaatgactacatttaaatctctgaatttttttcttaagcacctatgttaatcattttacttcttatacttaaaatatcaacgtttaagaaggcagatgaaacatagccacattgacctcagtttgcaaattactgatttaaattagaatcaaatgataattttgaagtcagacagtccttttgttaatgaaacatgattttctgtcctttttattcactgaacttttttttaatgtagttcctttggcattgtcttatgtatgtcttaaatagaaattatgggtggtgtttttttaattgggaacctgtaacacgttaataactgggtgatttatgtgagactataatatgttaaactaccatttttctttattttaatacagtatcttttatattaggccttactggtaagtaatattttgtgtaagggataagtagatggaggccataatattaacaaagaatgaaattagcatcagatcacaaaattaattttatgtttccagtatacctgtgggactaacaagacaattatctgctttgggtccttttcatccacctgtcccctttgagtttgctgttttaaataaaaactgggcagtcgttgatcagtttaaccctttccccatgtatgtgcatgcccttgtcgttctaattgatgacatcataggctggagctgtcttctctttaaatgtgttactcattggccttggctggcaggttgttaattcattttggacctgctactatgataaagaggaacatagttggcttttctggtcatctgtctacctgcagcagggaatcattgcctagcagagttgtgaagtttatccttcataataacagcatttaggaaggaataatgaatacgttgaaaataccaagggaaaccactggcaaatgtaaatgttctgattaagggcatatggatagatttgattatctgtaaaagggaacattgtcagtagatttgctctttcttggataatgtaaaaggtcaatgtttttggtaatgaaagtaaaattttaaaaggtaatggaattaattgatgattctgaatactcttaggacttttctaattttttatttctatcacatcatgtaattaaagatcaatatagttaaaatcatttgaacttaggtagtttctctaataaatcgcttgttcagggaaatggttcctgagaaagtatgttagcaaactcatacacacttgaaacttctacattcctgtccttattagattgtaagctcccaagggcaggactctcatcttttttgggtttttttgtttgtacattttttgagctgagctgtatgtcttctgtgtagatcagttcatatgtttttgaaggataatttctttctaaattaatgtacacattccttaagacttgtccctctggtttaacacattataatctgagggttgaaagagaccttaatccaatagaaaattttaatatgcaatatgtataacataagttttatctgagggttggaagagaccttaatctaatagaaaattttaatatgcaatatatgttacataagtttttctcagacatgttgaattaaccatcatagtaatatggcagagagttaattctatgacaagcaaacatctctcttttttttttcttttatactgaagtcaaaggagaaactgcttcaaagcttcaatcagaaatttcaagaggttgtcaagaagatgggattagcataaatagtgttcaaccagaaaataccacagcggctcacaatgatcttcctgaaaactccatcgtcaactatgactcccaggccctaaatatgttagccgatctagcattaagctctgctacttcttccacaccagtatctgaggctagaaatcttcactgttcctctgaattgccacaaaatgatgttttgctctctaaagaaaattctttgcgaggtacatctgaccatgaatatcatagaggagttaaaactcaaaaaggtgaattactacctaacccatcttctgataggaagagtaattctggatcagacttaacagttagccaagatgaagaaagcttggttccttgtagtcaggcccctgctaaagcccagtcagcacttactgaggaaatgctagaatcttcagatgcaagccaaagctcttctgtttctgtggaacattcatatgccctgctccttacagaacattcaaagaaacatctacaggagagagagatactaagccctctgtttcccaggaatgggacaaaaagccctgaagcagcaaccccagtggggaaagtcatgccatttcggcatcagcccggccttttgcttcagcaaaagcctcctgacgaccccgtggtgaagcccaaggatcgaccaccgtctgcccgtgtgaaaaaatcttcttgctctcgtatagtgcttagctgtgatgactccgttaagatcactttcaaatgtgaaacagaatatgcattcagtttagacagcaaatataccaacaacccactggagaaaactgtagtaagagcattacatgggtgagtatgagtgaaacttagtgaaaatggatgaaacttttctgttgagatgaatgtagtgagatggggaaacttatgccaaactctggagaaggagaaagaagtgttgtgtttaaaaccagtaatttgataataacatcaagcaaacatgtttcctggcaattaagagtaacaggctggttttccccctgtgctcatgtggagaagtttttaaagataattttagcctaatgaatagctttccattttgcaatgctccctcgtaagcccttgtggcttttgaatttcaatttttagatgagatcttaatgtaaaatagtgtgagatttagaaataatgctttacagactgaattccagaagaaacattttaaaaatcactgtagcttggtaaattggtcagattgataggagtaagcagtttcacataagattgttctatagatctcccttaagaaggaatcaagtcagtaataacagagtggtgaacagcacaggctttggagtgtagactaacctagatttgaacccgggttctttccctttcttacctcctgtgatcctgggcaagtttcttgcttctggacagtgcttcttaattgtgtgtgctgctcatctagagatttcactgaactgcagattttgatgcattctccttgggagaggcctgacattctgcatttctaacaaattttcaggtgatatcaatggtggatgacagtctgtggccaacatttaattatgtagctgtgtcctgaggttacatatattgagatgcacagtgactggccagtagtagtaataaatggtaaccatcactgttagcaagcattcattagctatatgaattgacattcagctccctattaatgaactgtttcacatctgactatatggactctacagctgtcaggctttcttctatacacctgttcatatatactcataagggtcatttccttagaacttcctgtttagctattgcccaactctgcagcccccctgacttatggtactccagcgatctgccatccttttgcctgccaggtggccagaaatgttttctatttccccttactgtttcaggatattttgcagaactgtagtctgaaaatagtatagttctgttgaattgcccagagagatattttatcttcagactttctcaattattagaagagagacacaaaaatggaaaataaatgaatcagccagacttagcaaaagcatggtgatgaggatttgggtattggcgaaaccatttctataataagtattctgtgtccagagtgaatttgtatggtgtaaaagacacgtgctacccatgttcagatcatggttctgccatacaggttttgtgatttgaaagaaggcaattacatgttctgattctcagttcccgtctctgtaaaatgagtgggttagatggataattatttgttaagtcaactacatatttactcattcatgtttcatatctgtaaattttaaaaataaaaacaaaaactaaggaatattggaggcacttgcttatgataaggtaatcaactaaaataaccattttcaatgattttcatgtgttctttctgtaaactcttaggccctggaatactgatttgcctgataatgtggaagaagtgaagcttttacttcatatgtgggtagctctgttttacagcaatcagaacaaaatcatacgatcttcccgaaaggttgtagaacacagcaacccagcaaaatatgtgtctataaatagcacgttagaatcttgtgagctccgtgaaattgaggagtcccttggtttggaaaaatgttctgcagactctctgttggagactaacgaaatttccagggctcatgctgctgaagtatccttccgtgatcctaactgcttgcttcctttcattaaaacaccacttacccaaggcttggaactctgtgtacaaaatgaacagaaaaaaacttttgcaagagagtgtgatccagacacccaagaagaccagaatttcatctgttcttacaataatgaggtatgtaaagctgaataccgttaaatgttggcattatttttgaagaaaaaaatgtttatatgtaaaatcacattcaaaacaaggcatttttaaattttaggacagtgaattctcaaggtatgtaaagaactattacaccaaaaacctagttttcatgaagtgtccttgaattgtctgcaggtagagcttacctgccatcccgattgaaaaaaaccagagtagaaaaatgtcacagggtccacatgatctgggagcccagcataatttggggcaaattgcttctttgcctaatttttaaaagaggtgacttaatacctatcaagtcttatgtagaatattgtttaaggatcaaatatagcaataataaatcttagatatactttgataaaccttaaagtaaactaaaattaattgtattaaaattatttttgaagacagatgctggaatagtaaaatgccagacctgtgaaagaagacccattgcaaataactatttgtaaatatggaaaatatactttgttttgttccttgttctcaactgacattcaaccaggccagataatccaaattttacctggagcaaatctaaaagttgttaacaaaattctaagcaaatgaattgacaaaattacctaccttttaaagttttccgcccaaatttattctagaataatattgcttgggtttgggcagcatctctgattcctgtcttaagaaagagtagacagtgttcctatacccggggtcaccggggacttggaggtccttgggtgagcctcatagaacccgtgaatatcttcaagtgattgtcatcatcatgagaattaaagatttctgggtcactgtgtgccagaaagtaagagttctaagcccttcactcatattaactcagttcattctcaaataagttaaagactattaatctccccattacatagatgacgagactaaagcatagagaagtaaagaaattgcctaaagtcacatagaaaattgtcaagccaagattccagtctagaaaacctaaatgttaactatgtatgtgctttttttttcccctaaagatggggttcagcagttccatcctattctcaaagaattacataaaatccagttaagaatcaccaccttagaataagaaaatatagtctagtcagggagatttaaattaatacatatatacatgctagtttcttataaaataccatttgtcgtggtaatatgtaattaactatcatcagtactaattttagcaatgattttggcaagcctgactgttcaaatcagtgattcctaacaatctccttagtatgtacttacgtaggcttttgtttttttgtcatcttgttgaatgctgtgcctgtacttgaaaggcacacgtgtgctatcgcactccctccaccagttggcacactggaatgtgaagaagaggattctagcatgataggcactagaaaccaaaagcatgttgctgctagtcatgtgttgagttgagcactctttctgaattgtcagactttattttagaagcattacactttacctgtagtaaaaatatatcgaaatagaaatatatcaagattgtcactatttgcatttcactaagactacagtcatggtgagatttaggactgaggctaaacgttaccagccacatgattgggagggccattaaagttctcagaaggacactgactctcaagacttttctaatactttgttctcttaaaactctgttgtctcagccccacactgttgactctgtttttttgttttgttttgttttgttttgttttgagaagtctcactcttgtctcccaggctggagtacaatggcacgatctcggctcactgcaagcttcacctccctggttcaactgattctcctgcctcagcctccctagtagctgggattataggcgcctgccaccacacctggctgatttttgtatttttagtagagacagggtttcaccatgttggccaagctggtctataactcctaaccttaggcaatccacctgcctcagcctcccaaagtgctggggattacaggcgtgagccactgcccccagccagaaatggttggttggtttgtttgttttgttttgtttgagacagagtctcgtgagccactgctccagccagaaatgagtttgtttggtttggtttttttgagactgcagcctccgcctcccgggttcaagtgactctgcctcagcctcccgagtagctgggattacaggtgcatgccaccactcctgggtaatttttgtatttttagtagagactaggtttcgccatgttggccaggctggtctcgaacttctggcctatagtgatccgcccaccacagcctcccaaagttctgagattacaggcgtgagaagccgtgccctacctaagacagaaatgtttttaacaagagatttggaacacagttcctgatttccaacatgtatgcttcaagacatggcacgcagtttgtgagcatggtgttcccagcattgcagaggggtgtgatcagttgtataatcagttcattttattatatgctcgacaaggccatgcttgaggctttaaataaaacaaaaaacaaataccaccctgtttatgaggttatgagaactgtcctgagatgatagctctgctaatgtttaacctaaatcctgcttgctactgtttaaatcagtgcctttagttcagtttatgattgcaaactgcattgataaagttttcaattgccatgtacaataggtattcaaatgagaaagaatctccagtttcatgcaaagaagatagctaagggatgaggggcctttgttgactagaatcaatgtattctgagtacagggggtagtaattaatttactctgttgcctcatgggaaagtttcagatgatggtgtacttatggtctaattgaaaacggatgttaaaaatgttatttgctttttaaaaattatcttttaggctgggcacagtggctcacacctgtaatcccagcactttgggaggccgaggtgggtggatcacttgaggtcaggagtttgagaccagcctggccaacgtggctaaacctcatctctactaaaaatacaaaaattagccgggcatggtggcatgtacctgtaatcccagctactcgggaggctgaggcagagagtcacttaaacccgggaggcagaggttgcagtgagccaagatcactccactgcactgcagcctgttcgataaagcaagacgctgtcttgaaaaaaaaaaaattaatctcatttattaaaaacaaaattgaatgctttttctctagtgctacacttctggattaagcggtgctaagtagcaaacaggctgcatttaaagtcttttaaattgtcagtggtctagttatttttcttccaaaaagcttggagctctcttctgtgtgtggttttaaagaaaacaaatcccactggggggtattttaagtctgcctttaaaagagggacttgcttgatttgtaccctgtgatattcttttagctagaaaattcagaagaacattcacaaactaaaattaatttttatcttttctgttcttcacatgtacatataatcgtataaaaaacattttatatgactgatttttttttttttttactttggccgtttcaggtaactggggaagaagctaaacaagaatcattggagacttctaatcttgtgctttcgggtattggaagtacacaaactaatggaccttctgttcctagtgaagaagaaattgttcagccactggatagcacaagagtggcttcttacagtggcactgttactcaagccacattcaccaggacttacgatgggcctggcagtcagccagtgatatgtcagagctctgtgtacggcacccttgaaaacaaagtggatattcttgatgcagcagtgcaaacaaaaacaggtactttacaggaccttatccaacatggcagccccataaacaatgaatgtcacccttccttggaaagaaaggatgataatatggggtgtgcagtgattaacccggaaccaattactctcacctttgaaaaaaatgcacatgtaccaatacagacagaaggtgtaaatactgctgatgaacgtacaacctttaagaaggagttgattaagcaagtatcacctgctgcaagccttagacatcctgtatccacctcggaaaatgcacgaacacaaggcctgagggacattccctctctagtagttgcaggacagaagggcactaagtacctttgtgcctcgtcagtaggtggagagacacttgataaagcagtgtgttcattacagaaggagacgccccttccagtctctctaccatctgataaaacaatggtcatggaggcactatcattagctaaaagttctagtcatctatcacccagtgaagaagtgagatgcactcaggatttcctttcacagactcagagtctcctcggcctatcttcagaagggcttctagaactgacacaggttgaagtggactcatcatcagcctctaccaccttgggaaggcagtgttcacttaactgcatttcgtcaggatgccacacatcaggtgactctttagaactaaggaagaatcacaagaatggtccaaacactgaaaatatgaatttggaagcgtttgattcagtatttatcaaacaaacaagcctgtctgtgagtagagaggtcagcctagagttatcagaggaagattctgacattgacttagctctaacaatatcaccacctacaagtcccagagaagaaatgccagctggtgaaatagagcaatttgaggaggccccattctcaaatttagaacttcaggatgtagctgaggaaataggtgaaccggaagaggtggctctcacagaaagcagagaagtgagttctgctgacaatgtgtcagtatatccctcagtgtcagaagaaccagtagaaaataaggagagaaagggggataatttacaaccagttactttaatactttctaaagaaaattgcacccttgagattgcagaggaaattaatgtgacctctgattttccctttgattctgtaattgaagaagtatcaccagcgtctagtcctgaacctccagtaccagttaaagagacacgaccatatcaggctgtgactccatgcattttaaaacttcatggtacacagtgtgagaagagcaaccaaatctcccaatgtgagtcagaagacttaggcataacagaaaaagaaaatgtttttgttggtcctacccatccagtggggcaagataactttacccaggtacaacaaatgcaggtctctgccgaaatgcctctaatattaactgatcatccaggaagaacaggtagaccaacccttcctggtaaagtaactgaggaaattgtctcaagtgagcatgatgagggtttatctttctcaggaaaggtgcagtgctatggtagggagttaaaccagcctgcctcagctgccaaatgcacaggtgacttcagtccttctcctgaaaaactggtaaaatcaggaaatccattgcagccagttagtatagagaatagaaatttggacttaaaacatcttgtcttggagtccagtgaacctccatttggtcctagaaatgttattgaaaataagtctttgtctgacacattggtttccacaactgcaccaagtggtatagtgaatgtgtcagtaaaacagcagactagccctaaaagcagtcagaaccatctctttcccggtgatttgaaaacagatgaaggcatttatctgcaggtgaagtccttgacagctgcctcggttgatggagcttattctacacagggatgcatgtgctcagtggtccccacgctttgttcttcctcagacaatgctacattaacccattatgtaagaccaataaatgcagagccagtgtttcaagcacaggaaataccagcaggcagaatggccagtttgcttaagaatggtgagcctgaagctgagttacataaagaaaccacaggtccaggcactgctggccctcagtccaacaccacatcttctctaaaaggtgaacgcaaagccatccacacgctgcaagatgtgtcaacatgtgaaacaaaggagctattgaatgtcggggtttcctccctttgtgctggtccctaccaaaatacagcagacaccaaggaaaacctcagtaaagagcctttggcctcctttgtttcagaatcctttgatacttctgtttgtggaatagccacagagcacgtagaaattgagaacagtggggaggggctcagggctgaggctggttctgaaaccctaggcagagatggagaggtcggtgtgaattccgacatgcactatgaactctctggagattctgatctagacctgcttggtgattgtagaaatcccagactggatttggaggattcttatactttaagaggtagttacaccaggaaaaaagatgttcccacagatggctatgagtcgtcgttgaacttccacaacaacaaccaagaggactggggctgctctagctgggttccaggcatggagacgagcctccctcccgggcactggactgctgcggtaaagaaagaagagaagtgtgtgccgccttacgtccaaatccgagatctccacgggatcctcaggacttacgccaacttctctataacaaaagaactcaaagataccatgagaacttcacacggcctgaggaggcacccgagtttcagtgcaaactgtggcctgcccagctcctggacaagcacttggcaggtggcagacgacctcacccagaacactttagacctggagtatctgcgttttgcacataaactaaaacagaccataaagaatggggattctcagcattctgcctcctctgccaatgtctttccaaaggagtcaccaacccagatctccattggtgctttcccttcgacaaaaatctctgaggccccatttctgcatcctgcacctaggagcagaagcccccttctggtaacagttgtggagtcagatcccagaccacaggggcagcccaggagaggctacacagccagcagtctggacagctcttcctcttggagagagagatgtagtcataatagagatcttagaaattctcaaagaaatcacactgtttcattccacctcaacaaactgaaatacaacagtactgtgaaggaatctcggaatgatatttcacttattctcaatgagtatgctgaattcaacaaggtgatgaagaatagcaaccaattcattttccaagacaaagagctaaatgatgtttctggagaagccactgctcaagagatgtatctgcctttcccaggacggtcagcctcctatgaagacataatcatagacgtgtgcaccaatttgcacgtcaaactaagaagtgttgtgaaagaggcttgtaaaagtaccttcctgttctaccttgtcgaaacagaagacaaatcattctttgtaagaacaaaggtaaagtgccagccacgtcttacgtattattttaattgctgattttagttttagaaataataaatttagcatattagccatcaaaaagaaatcatggtatgacatagtatttaaatttcacagcttagtctttatctgcatactaaatgttttcctgcaggatctgccatttgtactatatttgaaaattagtattatgttccagaattagggcaatgactaattttttttcacaaaaagttaccagtgtagacatgcccatacttcaagtgtaaatacaaacacattccgatgttaaaatacagattttttgaaaagtggttgtagattgtccgttagtgtgggtggtcaagtaggacctcttttggttttggatatatttttaatttgaatttgaatgttaggataactgatgttacggtgagtacatggagtacatagtccttaaatttaagtaatggaaccatggtgaaattctggcatgggcggagcctgtcttgattgaacctgtcttgattcaccattaacttcattgttttatcctcccagaatttatttctcttctatttcgggcatagacagtatttttaaaaatttaattgtttttaatttcaaatttacataaaggttgcagaaatagtaccctttacccagataccccaatattaacatttctgaaccatttgcaaatgtgttgcacacacagtgtcccattacctcttgatacttaaatgtgtattacctgagttcaaggatcctcatctttttaaccacagaacaaccctgtgcatcaggaagttcatataatattaattaaagtgaccatctccattaacctcatctaggtctaggatcataggtgtctagaattgtcatgtcttcagtctgcaatagttcctctgttattccttgtcttttatgaccttaacagttttgaagactgtaggccagttatttggtggaatttccttccgtttgtgttcatgtgttgtttctccatgacttaggcattttagatgagaatactcagatatcatgtagtgctcttgtcagtgcattcattgtatcaggaggcacccgatgttgatttatccccttactggtatattaaccttttcacttggttaagatgatttctgccaggtttctccagtgtaaagttatgttgaacttagtaataagttgggagctaacttgagactgtgtaaaatcctattccttatcagacttttatccactagatttaacatcgactggtgattcttatctgaatcagttattactatgatgattgccaaatagtgatactgaaattccaccagattccttctgcatttattagttggtattcggctgtagaatagagctttcccttattttccattcatctattcatttgcttatctgtatcactatggaccatggcacattttgttttacttaaagggttatcatctgtttcttcattattttaatacttagattgtcccagacccagccagtgggagtccctttaagttggcttctgtgtccttttgacaattcgccataattcttcgggcacttctttactttggggtgtaacataatgttccaggcttatcgtgtattttccttgccctagtcttgaagtcaagcatttctccaaggagctgtgactctttagtgaagaatggcatttagaaccaccatctaggcactgcgtgaatgaactcagtgtcacttggtgtctttgcttctaggtcctctcagcacataaagccaagaaatatacatatgtacatacgtatatctacatctctatttatgtataaaaagcaaaaacagaggagttcacactcatccccaattctagtccagtactgccaggtttgtgctagcctccttctccatgtgtggagctcccttctctgaggttgactctgtttatcctcagtgttttgacttattgtccctcccaagtccccctcccccatcctcctcccaaccccaggtataatgagacccctcactgaggcactaatcctgacctcccgaaactccctgacctgagcgcgggccagctgccctccccctacccttgcagcagaaagctccattcagatgtcagcagtcctgtttagtatctacctcagagccccaacatgtgcaggtgggggggatgttgcttttttgtcatgattcttatagtctaatgggacaaggaaaacactgattaaaagagtcacacaaataaatgtgaaatgaaagtgatggtaaatgtgacgcaggtgccacgaggacgcattgagggtgattggcctggccggggaggtctttgctcaggaagtgctgcagcacagaaagcagagcataggggcctgcaggccgcgtgcaaaactggacgtgccgtgtgtcggttccacacatgaggggcctgcaggccacgtgcaggccgtgtgtcggctccacatgcccactgggtctgtctcagacttcacttacatcacttctgctgatttcctgcgctaactccagaatgtcacgtggcgagtccatgggggctggattactgagtaacgagttacttagtaatgaaggacacgtgtcccttattgtcacagtgtcccctgggtgcagggtcacaagaccacttctcatctggagtactaaggccactgcagaaaccacagagctgcataaagatttcttggtctgccctgctcttctcatatggaggtgtgtagctggcaaacaccacagggaacagcctccttgtgccagagggctggtcagagtgagtgagccatgtcagccagaggctcaggctgggctgtgggagagaacagcctcacgcctcatatggcagtggcagggccttaagtcacactgagctatttagacttcatcctgaggtcgctgggagccactggaaaggttctgttaggttttttcctcctaaccactagaccgccagagatgaagttttctaaaagatgtttttaaaggtttttttttcaagtgaagcaggcggagtagggaaggattttttaaattctttaaaaactggttgtgatttgttgtaaaagatcctttaagaaagaagtagcatcatatttgcattttaggacgatatcttagcggatggagaagagattggaaaaatgacagtcactgccttaacgtgaaactccattgttgctagagtcacagctctgttctgcaaggtggctcctattttgagtcaactaactatgactgtaaatgttttcttcaaacttgtggaagctgctctttagcctaattgtattctttttccctggctgaggatccttttgtttgccaaggtttgtttgtttgtttgtttgttttttgagacagagtctcgctctgtcacccagactggagtgcagtggcgcgatctcggctcactgcaagctctgtctcccgcattcacaccattctcctgcctctgcctccggagtagctgggactacaggcgcccgccaccatgcccagctaatttttttgtgttttttagtagagatggagtttcaccgtgttaggatggtctcaatctcctgaccttgtgatccgcctaccttggcctcccaaagtgctgggattacaggcatgagccactccgcccagcctgtttgccgagattcttaatgaatggttgccggatttggttttatattccctctgttgtctttgctccaagttccttgccatttcggtaagcagcactgtagttgaaaagttattgaatggtcttcactctcttcagtctttgggaaggccctcagcctccaaaagcaatctggaaatcagtttagtttttttcttttaccttgaattcaggttaattttatttgattaattatacatcctctaccctgacatgagatagagtgactctagaatcaaccaagtcagcatcttggtcacgtacacgttttggcacagtgagcaaaatacttggtttctttcagcttccatcttctcaaaaagcaacagagggtgcagtgctcatgcctgtaatcccagcactttgggaggccgaggcaggtggatcacctgaagtcaggagttggagaccagcctagccaatatagtgaaaccccgtctctactaaaaataaaaaaattagccgggtgtggcggcgcgcgcttgtggtactcgggaggctaaggcaggagaatcacttgaacccaggatgtggaggttgtagtaagccactgtgctcccagcctgcccgacagagtgagactccacaacagagcagtaatcttagttctcacttcctttccagatgaagtgataatgattttcatgaagaagagagcatggcaatgctaagttttattcatagcagaagtacttttttttttttaattgagatgaagttttgctcttgtcgcccaggctggagtgcagtggcgcgatctcagctcactgcagcctccgtcttctggtttcaagtgattctcctgcctcaccttctcgaatagctgggattacaggtgcgtgccaccatgcctggctaatttttgtatttttagtagagatggggtttcaccatgttggccaggctggtctcgaactccatagcaggagttcttctagatatcttgcttgtttctatagtgaatgtattgtttcataatattttatcacgtggtgtcactgtttacaacagaaaataacaaatgtgcaaaggtaaaactacttgtcaactgagaaagtggacacggccgggcgcggtggctcacgcctgtaatcccagcactttgggaggccgaggtgggcggatcacaaggtcaggagattgagaccttcctggctaacaccgtgaaaccccatctctactaaaaatacaaaaagaaattagctgggcgtggtggcgggtgcctgtagtcccagctactcgggaggctgaggcaggagaatggcgtgaacccgggaggcagagcttgcagtgagccgagatcgcgccactgcactccagcctgggcaacagagcaagactcttgtctcaaaaaaaaaaaaaaaaaaaaaagagaaatctgagggtgtgacagaataggtcagaccaccacaggatttgatgaaaatgtattcattcaaataatttgttagtcaaataaatgaagactagagatttatgcctagatatttcagtaagctcttcgttaaatctcataagaatttttttgaaaatcataccatatactttgaatgaattgaaatagtcagaatttgagttgtttaaagatccaagggagccacacagtggctctcgcctgtaatcccagcactttgggaggccaaggcaggcggatcgcttgaagtcaggagtttgagaccagcctggccaacatggtgaaaccccatctctactaaaaatgacaaaaataagccaggcgtggtggcgggcacctgtaatcccagctactagggaggctcagggaggtgaatcacttgaacccaggaggcaggggttgcagtgagccgagatttcaccactgcactccagcctgggtgacagagtaagacaacatctcaaaaaaaaaagatccaagggaaacagatcaaagtaacacttcacttttatgaaggaaataagtgatggtcaggcagtcttctgggcataacagaaacccagaatccttcagccagatagtcaatgtcaaggccaggtgccacggttcatgcccggaatcctagtactttgggaggctgaggtaagagaactgcttgagactagcttgggcaacactgcttgaggccagcctgagcaacatagacctccatttctaccaaaaagaaaaaaaaagccgggcccagtgatgtgcacctgtagccctagctacctgggaggctgaggtaggaggattgcttgagcccgggaggtcaaagctgcagtgagctatgttcgtttcactttactgcagcctgggtgacagagtgagaccatgtctcaaaaaaaaaagcaaagaaatgtcaaagtcatagggagtgtaggattatagaatttatttaattacacaaatttaccctcccagtcaggatgattagggagccattctgtgtgttgattgtactgggctgcactgcagtggcaccgtacaatcgcatgctgtttcaactgcatcacctgtcttattctgagacgtagacccaagggactgctgactccaaaatcagtcccctttaatggtaaagaaatacatgggtattgttttttaaagctctagaaatgctttaactacaggtagcatttttaaagtatatatctggtattctcaaggtagctcatgccttgaagcagatgaaactcatttatgtagattattctgatgttctaaaagaaaatcagcctttgatactttatttacctttgaaatcaacttctaagtccagttgttaacaatacctgattcatttattttatatataaaaggtgcttatttagtaataagacaaattgtcatttatggttgccttattagactatactgcttttcattattttaataaactatacaggtagttctgtggaagtaccctttttttaataatggctatttgtaaatctttcagaaccttctgaggaaaggaggccatacagaaattgaacctcagcacttctgtcaagctttccacagagagaatgatacactaatcatcatcatcagaaatgaagatatatcatcacatttgcatcaggtcggttggaaataccttacaaagaaacgtattccaggcacataagttgttctgtaatgctcagactcatccctctttttttatgtagaagagaagctaacagacattactgttgggcctttaagtgggaagatggtgtattatagaatactgcaatattaccaagttatttgtagggcagatggttaaaaaaatcatattaactaagggagacttaggtgagaggttgctaaattttttcatctgagatataaatctgcatcacttgatgtctaacaataagaaatcttgccttaaaagaccttttggaaattttctgaaccattatatttaccagctagttgaatcaaagtaattgcttgtctcaagaagacccaactacggacaaaggctgggtgcataaacctgccgtcatcagcaggcagtcgtcggtgctggcaccaaggggagctggagacgaatgacggcgaagtgaggtgacctcacttttcagtgcccacaacctcagatgtgtcctcttccctcatgacgtgttatttccaacctttgggagtttgagacctttttttaatgaactaattttgttgagtttgcagcccctggtgatgatgagctcagttaatatgcctcatgcagggcagaatgaccagtcggtaatccaggttgaaatattttcagttgttcctgaaccttgactctcttggatagaaaagcaagggagtgtctaagaaaatgtgcccagtgagcctctcttcaccggggtcctttttgtgtcatgcagattccttctttgctgaagctgaagcatttccccagtgtcatctttgctggagtagacagccctggagatgttcttgatcacacctaccaagaactgtttcgtgcaggaggctttgtgatatcagatgacaagatactagaagctgtaacattaggttggtctttattttcttttcctgtttctttgaagtcagatcaacttctcacccagtgacctaaatactgtttcatccaaaagaaatgatcaactctaaggaatatcagttgccccctactgaggcataatttctgctgtctgctgtgctcttttcatacagtgattctcttatagcaatgcttttcacctcttttaactgattcttaccaccacacttgcttctgagttccctccctctcggtagtgcagctaagctcctagtaacacaaattcaggattttattatatttagtctcttcacttgccaagtcagagcagctccatattaaattgtttgcttaaagtcaaccttctccatttctgatgtcaacacccctaccatcttgatgtcacaaaaatctaaaaaatggctactaagtcagcttatttaatcatctacttgaaaactcatactttacttctctcagggcacttttatgtataaaacctgccccggctctgatcacattggaagtgataccacttctagatcaaaagcagcatgtaccttaaccagtgtgacttctacacagaacctgggattttaaatatttgtaggcacacgtctgtaatcccaacactttgggaggccaaggcaggaggatccctggagatcaggagttcaagaccagcctgggcaacatagtgagatcccatctctacaaaaaataaaaatactagccagctgtggtagtgtgtgcctgtagtcccagctaaggagactaaggatggaggattacttgagcccaggaggttgaggctatagtgagctgagatcatgccaccacactccagcctgggtgacagccgaaaccctgtctcaaaaaaaaaggattctgtatttagaaacttcatttctctactgcatcggggcctcctgcttctcttctgtcacacaatttgtacacagaactctagttgctggtgaccactccactgtgttcgtgtctacagagttatctcccaccatagtgtgagcaggtgggaccaggctgaggggcttgtgagagcaggatgctgcccaaccacataagtgacagtgatggtgtgtactcaaccatgggtcttagtctgtttttttcttgttttacaaataattatcactgggcttggcatgagccaaaagtaccttaaacttgtcatcttcttttgctacatttattgttttgtagttcaactgaaggaaattatcaaaatcctggaaaaactaaatggaaatggaagatggaagtggttgcttcactacagggaaaataaaaagctaaaagaagatgaaaggtaaggacttgctgtgtgtatggttcctcctgccctgctggggtagcagagaaacgcctcatgttccatgggctctagcctagtgctgcagtggaatggccttcatcagtaaagagcatgagggctgctggctctgtattcaatgaaggaagctatgtgctgtgaccgtagccaacagtatgaggcatgtacttatctagactaacagaagtaagggagtcaaacttagcagtcatgaaatgtccatattctatttaagccctactactacaaactttaaaaaatatatggaacttgtaccattaatgcttttttggatacttataagttgccaccactttaaggagaatggaaaaattaagaccataatctatccttaattcagttgtaccctaaaagaagaggcttataaatacgcaaacttcactaagtctaaagctgtaatttataaaagaaaaaaatacatgtttgattccttggctgaagagagctggggctgagagattcctccacattctcacaagcaggaccaattggaaaagcagacctgacaagcccttgtgaaataaggatttcaggcactgttaggtgcatccattttcattcagacttcatccccaggagctagatagcaaatcctcacttttataatgcagaactgaagcagagtagataacaaacatgaccaaggtcaaacaagtagtaagttatgaagctgggtttcaatcccagaaagacgaaacgactgttagctgtatgtgacctttgaggaacagaatctcagaaagcttttctcttgaagtggagctagcaaaggagagaaggagcacagaggtttccttggcaggaaaggagggtgcaaaggcttcagcaggtcaagggtatgaccattcacagcggacttcagtaaccagcacttgaggggaaaaacgtcaacttcggtaagtagagaagcacatttaaggttctgatgtaccacagcacacctataaaataagcataaatcaatctagcacttctagggctttgggtagagaaagtcatgtcacttaacgacggggatacagcctgagaaacgtcataagacgattttgtctatgtgcagacatagagtgtacttacacaaactgatatggtagagcctactcctagattgcaaacctgtacatgtgactgtactgaatactgtaggcagatttaatgcaatggtggtatctgtgtgtctaaacacaaaaaaggttcagtaaattacagtagtataattttatgggaccaccattgtatatgtggtccgtcattgactgaaacatcattatgtggtacatgcccgtactcactgctgttggcgctgcagtatgctcttcatattataccactctggcattatgtaacaggcgttatgtattattgagaactcattagaaaactcttcatatcctttgaccttttgtggaatttacccaaaattctaggtggttatcagtcattgcaaaaccaacctcagttccatctctaggagggagatatgcagactacagttaaatattttaaagtttatacaaaataatgcccacccaaaacttacacaatagaagcatgtaaaaagtttctattcatagaaagagggatggcataaaagttggtatcatgtaactatgttcagtatgatgtcataaaaaatttatacaggaaaaagtgaaaggaaattaattcatgatgttaagagtgattatcactagggttatgggaatgggtgtgatttgggttttctccaacaagcatgagaatgtaagtgatgaaaactagagagacgggagtcgagcagagacagaaatgctaaaaatttaaacatactgagttaacacattttcctagtagtgatagaattttcagggaagcaagaaaccaagaaaattctggctgctacctaattttaatgaagttggcgattatctgcccacaaggtatgagaagtatagatgtgcattgctctacaaatatacaacgcaataaggcccactcgaaattcatgaaaggcttgccaagccacatggcttgattggtcgtaggtagatgcatgatgtccctcttagaatgaggcccatgtttaaaatccacatttacaaaaggagtaggtacaattgtgatgttttgaggtaaccaaagtgtgtcatgaaaaagaacgtcaagaagaaaggcagaggaactcatgagtttgaatggttaaactgaaggcaagaaaaagtcctaagaataaaactgaaaaatattttaatatgcctatgtatctttcacagagtggattcaactgcacataagaagaacataatgttgaagtcatttcagagtgcaaatatcattgaattgcttcattatcaccagtgtgactctcgatcatcaacaaaagcagaaattctgaaatgtttgctaaacctgcaaattcagcatattgatgccaggtttgctgtcctcctaacaggtaattcacaggcgcattttactcagttaatgccaaaattggtcagctctaggaatgtcaaagttagatacctgatgaagagtatcaggtatctaaatggcttggcatcccatggataccagaatcacccaaatctgctgaagctgaagcccttatataaaatgtagtatttgcaggtaactacacaatcctcctatgtatgtaagtcagttctagattacttataatactcaatacagtataagtagttataccgtattattttttaaatcaatactggggctgggtgcagtggctcacacctgtaatcccagcactttgggaggccgaggcgggcggatcacttgaggtcaggagttagagaccagcctagccaacatggtgaaaccccatctctactaaaaatacaaaaattagtcaggtgtggtggttcatgccagtagtcccagctacttgggaggccgaggcaggagaatggcttgaaccccggaggcagaggttgcttttaaaaaatttgtggggcagccagggacagtggctcacgcctgtaatgccagcactttgggaggctgaagcaggtggatcactgagcccaggaatttgaggccagcctgggcaacttagcgagacctcatctctacagaagttggcaggtgtggtgatgtgtgcctatagtcctagctacttgggttaaggcagaaggattgctcgaggctgcagtgagccgtcatcacaccactgcactgtaacctgggtggcagaacaagaccctatctatctttaaaaaaaaaaaaaaaaaagtgttaagaaaaatttacgtaaagaaccatagttatcatttttcagggattttttttcagtactttaaccaccacccccgatggaggcatctatttccaaagcttcaaatcttttcttaatttggaacccaacaccttttctccccctacccctcacacgaggaagttccacagattttttaaaataaaaaaccaggtcctgttatataaaagtacattaattatattaaccaaaagttgtttttttttttttttaacagacaagcctactatccccagagaagtctttgaaaatagtggaatccttgttacagatgtaaataactttatagaaaacatagaaaaaatagcagctccatttaggagtagctattggtaagaacactttttatgtaactttcccatgtgagttggagttgttgatggcaaatattgacatttgtgtctaagggaaacagttgggaaactgttgtttacatacttcatgctataaatttaaagtgtttgtttaggggtggaattgctatttggcataaataggaattcctaaattatcactaaatgaagtaaccatctactaaaattacctattttatctaatgtgcattttcacttgctgttaacttggatcgtcagtacagaacataatgtaaccttagaatgcataggcgttttccccattagagcatcccgcttataaaatatttcttgttcgtattattttaagaagttctttatcaattttgtgtttcttcaggtgactcaactacagcctgcctggatatggatgatgccaataaaaaattagtattttccctttggaaaacttgtgaacatgtgaatacacatgtgaacagtcttacatttgaaaaaccaatgttctacaacttggaaagttttcattttttatattttgctgaaatatgtcacagtggcattgcagttgtctgttagctttgggttgcagtgctagatattgttttaaattattttcattttaaacaagatgccttctaagctattgagcttattaaaaataattttacatgtttacttagttggagcaaaaataagtctattttaacaaatagctttgtttttgcatgctaatgtcagaaaggcatacgatgcacattatgctctgttttaaaggttttaccacccttgtaaaaactataatcttaaatggttttatttgctgttacacaaacaacactacataaaacattttttcctaaatggtacaaatttataaactatcatttttcacttacggtatttgtaaatactacactacaaaaatcagctttctgagaaagaaataatcatttatttatgatattgaaaatttctacagtaaacactcaaaaccaagcaaaaaacatttgtaagatacacggtatctatttggagcaacggtttttgtaactaatgtgtttcattttttaaataaagacaactaaaaataatctctttctgcaatgatttttatagcagaaattgacttatctggagtgttctagcaatttttaggtcatttagcagaacagtaagcttccagaggaaacctacacttctatcctttgggcctggcctgttctgtttctgggttctttccgcagtcaagtacaccgagtaacaggttaaagaatggcagtttcacctggcctttacagggacacttacttctttcagaagtcattaagtcggcttttattattcctaaacaaaagagctttattttctcatgagtaggttttagagttttaattgttgacaatttttcagttactaatagaaccccagtcatttcattttatttttccaaggacaagagtctattaagggaaccattaactattcagtacagtgaattactttcagattactaaggaaaaggaaagtgagcagttataagatgccaaacacctatctatctgcctgaaatatgcacctttcaggttggacctaataacattcacctccccttgctgaaaagccttccaacacccacgaggccatctcagtttccatgctaccttttctgtaactctactaataaccaaaccacatcatgtgttcaccaaactgagttatcccagtaactaccattatcatctttgtctccactggcctggcacacaaggtattcagtaaatacgttgaatgaagaatatgaagatgcgtggtttttcttttttcacttattactaacccagcttgggcctttgcatgggaagagaaaaaggcttgctgggacttcagataattttatcatacaggtaaagcagtggttctcaacatctggagacatttttggttgtcattccaagatggtgctgttgccatctagtgtgtggaggccagggatgctgctacaatcaaccctatcaacagagaatgatccagcccaaaacatcaactgaagtcgagaagctccatcattttggcaatatgaataacaatctaaatcaccaccctagttcctttaacacatcatctaccttagtctgtctccttcatactctgaagagtcagtgtttatctgtggtaaacaacagcatctgccgtgaggctcatcactgtcaggggaaagggccttatatgtaaacactttatcatttcaactacacaaaaattatttactaaagcacctactctacctgacagttcacttactcccttataactgctgctacaagcaaaatcattaaacactattttttctgcacaaagatgataggtctagtaatggtactgtgtcaagaataaaactcgaggtctactcacagggaagccagacgacaggacctgctgtgatccttccagatcagaagacacccacgctttccgctgctgagcattctgactggcattgactccagtgctaccaaaggaagcacggcagctgtgacccttgcaatcaggacacacaaaccaacaccgggcagtagtttccagaatttggctttattttgcagtacagaaatcatttggagccattttgagacagaagtagaggctctgtcaagtcaatactgcattgcagcttggtccactgaagaagccacgcctgagatacaaaagatgcactacacttgacccgctttatgttcgcttcctctccccttctctctcatcaactttattaggttaaaacaccacatacaggctttctccaaatgactccctatgtctggggtttggttagaattttatgcccacataaaccaaacttgtggctatgctatttgggccctgccataacatttgacataatacaaaatataaagtcatagggaaaacttccggatgctgtcccaaaccgtggaatattcaatttagaatctcctgaacctcaagaggacagatgacacacaacctgtatggatccagctcttgagcagcagcagcacatagctacactgattaaaagattaaaaaaactgtctcaagttgtctgtgtcggtatcccaatgtttgtttaacttcactagaaaaaaaaaaagccagtttggttaaattgaacagaatgtggtaactgccaatgctgaatagccactccatgaaaacaagttaataattagaaaggtgaaggggagtatttactggcacagcgctcttcattctctccattttcattacaaaagcaggccttacaatattgatttcattatatgcattatttgccaaattttaaatgtgtcctaattacataataacatgtactgctgttagtcttccccatagatgtcattcttcttgcgcttcatttcctcaaagtcaaactctgatcctgtcatcctcttatagatgtttttaatgtcatcacacgttgtctcaaaatgagtggtggcatcatatgtgcgggaaataaagatctgaaaacaaaaattacgaagacttaagaccatggagggatgtcttccagtgaaacctgcccatatcctttcacacttccatactcacctggctttctgttcccaagtcttttggtaccaggaggtcactgatgctaacaaatctggagggagagagaattcagtcaggtgagctggtcccacacctgaccatggctctgcctgaggtcaactgagaggtacagatgaatcccacagagcagccagcagctacctgccttgccctcacattcgtcccaccatggagccacaatcaaaggcctcagtttgcatctcggcagatataaaagaacacaactcacttctgttcaattggttccaagagctccaaagctggtctgatttccttctcaggctccttggtttccacagttgtactaactatagcaatgtacttcccttgtgctgctacattgtgcgcaaaggagatcatgcagacgtagatatctagaaacaaatgataccagctcactgcctcaagtgtctccatctgggacccaacatactcaggtatcacccatatgtcatgaggtgtgagttaaaattactctcaataggcaagatcttctacacttaagttctaaatggtgacagagttggatgtaaagtacacagatatttaacaataggaatttcttttaacctactagagattaagaattgaagtggtagcgaactgctgaagtttggaatgagatctcttaacagctctgtcatacctaactaaaaaacctgccaaaccatattaactattctgggagattcttccattctggaccttgcatttagaaaggttctgaatggctaagaaaggatgtacttagtactgacgtcctcatttacttattacagtaatgtaaaactgcagaatccacataaaccacttttgagttggcataacgatagaattctcgattagacttggtctgtataccactcatccagttaactgtgtcatttccaggatagaaaatcatttggataggagagcatttaaaggccaaaaaaaaaaaactctgggacctcctttattcttttcagacttgcaaggacccaggacccgcctgggaaccttgtggaagattaagtccagtccctttgttctacagatcatcttttgtgattggtttttttttgtgttttaacagtctggctctgtcacccaggttggagacagggatgcaatcacagcttacagtaacctcaaactcctgagctcaagtgatcctctcccaccgcagcctcccaagtagctaggactacaggtgtgtgccaccacacctagccatttttgtttgtttgttttttgtttttgtagagacgagctctcactatgttacccaggctggtcttgaacccctggcctcaagcaagcctcctgccttggcctcccatgatttcatttcttatatgggggaaaaaaaatcattatacagatagctcttacctgtcccataaagcctgattaccctttttaagctgaattttagataaataaaaagatttggggcttctagttgaaaggaaaatgggaacatcgaagggttacaaacaactggctaagacaaataagttaggacttgcaattttagagccatgtcctgatcacagaaatgaaaggtggacactgctagaatcaaatgtaggtactaggattacaaataaggacacagaagcagctatgtcattagctcaagaatatactcgggtcagttaactattaagcataaacctccacaggaacctactgttagttagagctgggagacgcagggttcaccaagcccagtctgttcattctacaggtgatggacacaagtccaaggctggctccgagttgaatctgtccgcgttgacacaatgctgccggagcaggaggaggtacaaagatttttttcccccatatgtaaaccaaggtctgttcactaatacagcatacaaaattaggaatttgggataaaacacaaagcaaattatatcttacaaaattctaccaacatctgctggtcttcaaacctcacctgactttcgattgacttggttctgtggaataatgatctggcaggagttggcatcattggtgttcttgatggggtggctgaggatgcaaataactctgatcacctggcccactttttctacccgatcttttacgtagctggggtcacagatgagctgcttacagcgagcaatctataacaaagcatttaagaagacactgaagcggacaaggatatagggaaacacatcccatgttcatagtttggaagacttagtattgttaagatatcaaaaaccatcctcaagttcatattggttcccaagggattgaattctggaacaaccaaaacaatcttaaaagaagaacagcaaagctggaggactcactcactaaaaagctacagtgatcaattcagtgtggtactggcataatgacaaacgtatggaccaatgaaacgaggagagagccagaaataaaccctcgcatccacagtacagtgatttttgacaaagttgcaaagaccattcaatgaggggaaaaaaagtcatttcaacaaaccgtcctgggaaaactatccacatgcaaaagaatgaagttggaccctacctgacaccatccacaaaaactaaaaatggaacaaagacctaaatgtggtatctaaaactataaaactcttaggagaaaacagtgcaaaagcttcatgacattggagttggcagtaattccttgtatctaaaaccaaagacacaggcaacaaaggaaagaattcatgaaaacaggatttcatgaaaattttaaaaatcttgtgcatagccaggcatggtggcatgtgcctgtaaccccagctacttgggaggctgaggcaggagaattgcttgagcccaagactttgagtccagcttgggcaacacacagcaagacactgtctcttttaaaaaaacaataaagaaatttttgcatcagaagacactaatcaagagttgaggcaactcacagaatgagagaaaatatctgcaaataagggattaatatccacaatacatcaagaactcctaaaacaacaacaaaaaaaaccctgattcaaaaatgatcaaagggctgggcgcggtggctcacgtctgtaatcccagcacttcgggaggccaagacaggcggatcaccagaggtcaggagttggagaccagcctgaccaacatggagatacctcgtctctactaaaaatacaaaattagctgggcacggtggcgcatgcctgtagtcccagctactcgggaggctgaggcaggagaatcgcttgaatctgggagatggaggttatggtaagccgagatcacgccattgcactccaggctgggcaatgagcaaaactccgtctcaaaagaaaaaaaaaaaaaaaatcgaaggacttgaatagacatttttccaaagaagatatgtaagtggccaataagcacatgcaaagatgttcaacatcactaatcataacttcagtgagctactacctcacaaccgttaagattgctactatcaaaacaaaattaagtgtcaaggatatggagaaactggaacttcttgtccactactgacaggaatgtaaaatggtccagccactatggaaaatggtatggcagtttctcaaacattaaaaacagaattaccatatgatctagcaattccacttctgggtacacacccaaaagaactaaacgcatggtcttgatgagacatttgtacacccattttcagagtagcattattcacaatacattcacaaaaacatggaagcaatccaggtatcgatgaatggataagcaaactatggtctatctttccatacattggaatattattcagccttaaaaaggaaattctgacacatgctacaacacagatgaaccatggacatcatgctaagtgaaataaactagtcacaagaaggcaaatactatattattccgtttatataaaatatagtagttaaaatcatagagaaagaaagtagaatggtgcttgccagtggctggaagcagagaacgaggagttattacttaattggtagtttcctttagaagaggaaaagtgagtgtgggcacagtggctcacacctataaaatcccagcactttgggaggccaaggtgggtggatcatttgaggttaggagttcaagaccagcctggccaacatggggaaaccctgtctctactaaaaatacaaaaactagccgggcgtggtggtatgcatctataatcccagctacctggggaggctgaggcaggagaatcacttgaatacgggaggcagagattgcagtgagccaagatcatgccactgcactccagcttgggcgacagagtgagactccatctcaaaaaaaaagaagaggaaaagtgttatggagatgaatggtggttgtggtggttgtataatgatgtgaatatatttaataccactgaactgtacacttaacaatggttaagatggtaaattctggccgggcgcagtggctgacgcctgtaatcccagcactttgggaggccgaggcaggcagatcacctgaggtcaggagtttgagaccagcctggccaacctggtgaaaccccatctctactaaaaatacaaaaattagctgggtgtggtggtgggcacctgtaatcccagctactcaggaggttgaggcaggagaattgcttgaacctaggaggcagaggttgcagtgagccaagatcacgccactgcactccagcctgggcaacaaagtgagactgtctcaaaaaaaaaaaaaaaaaaaaaaaagatggtaaattttatgggtactttatcacaaaaaaaaaaaatggagggaaaaagactaatattcagtgtctataatgttttaaacagtatattaatgtaattttcccttgaatataatctgttatcttcataatctaatgaatataaaagtcaaggtaattattaaactgtcggtaactactgaaactagctttgccaattatccctactattttctccttgaacagatatatgaactgtaaatcctgttcaaatactaggaaaactgtgttgcacagtattcagaagtataagttttagaattgggcagatcagggttcaaatcctggctctacctaacctcaaaggattgttgttagtactaaaattcagccacgtccagccccttgaatgcaaggacatttttgcttatttgtggtggcagacatcacgaaattatgcacagaccctttttccagctatcattactgttagcatattttatgtgtgacccaagacaattcttcctcttccaatgtggcacagggaagccaaaaggttggacattagtgaactaaatgaaatggtgtaaaaaagtctgtcattataggtgggtgtcctgacaaaaaataaatgctcagtaaatgtactctacatagactaaaatccttatcatcttaaggctatgcttcctaagaaaaacttgaattgcaagataaatgtattatagcctccttccctttcatatcaaagccctgaagtttcagaaacacaaagaatgaaacaaaagaaaaatacagaataaaagtaactttcagaagacagattaaaacatttatccctggccgagcgcggtggctcacacctgtaatcccagcactttgggaggccgaggcaggcagatcacgaggtcaagaaaccaagaccagcctggccaacatggtgaaaccccatctctactaaaaatacaaaaattagctgggcatggtggcacatgcctgtagtcccagctacttgggaggctgaggcaggagaatcacttgaacccggaaggcagaagttgcagtaaccaagatcgtgccactgcactccagcctggtgactgagaagaaaaaaaaaaacacaccatttatctctatctcctaaacaactattatgctgaaagtacaagcagtgttactgtccctgatgaagatcttccagtggaacacgatgtggagatggaagacagtgatactgatgaccccaaccccacaaaggtggctgagtgaagtttgttggacctggatggtaaacagtgctatttgtgctgatatacctgagaattaagttagcattaacaaaacctagtaatgtacatgtcaaacaaaatatgacttcttttgtgctttgtaacttcatttaaagcagataagccaatcacactacgacagtcaagatgaaacagggttataaagaagttgcctaaaatatatgttcaaaagacccaattaagtaacagtctagaaggccaggcacagtggctcatgcctgtaatcccaacactttgggaggctgaggcgggcggatcacttggggccgggagttcgagaccagcctggccaacatggtgaaaccccatctctactaaaaatacataaattagccaggcatggtggcatgcatctgtaattccagctactcgggaggctgaggtaggagaatcacttgaacctggaaggtggagggtgaagtgagctgagatcacgccactgcactccagcctcggcgacagagcaaaacgatttgatgtctcaaataaataaataaataaataacattttagtagataaaacacacaaatctaacatcacccagcacaggaatttacatcctcaggtgtataacgactgagggctgtgggtgcggaacaccttaattccaattctacctcagccattcattaaactgtgtgcccttgtagatgtttcttcatttaagcctccaggtataacctggacataatacccgcctcttaggatccttgtaaggaataaatgagtttgaaaatgtgcttcacaaattattatcaggcgttttttgccccaagtcagtcctgtattttctctcccttactcattgtccccttacaccacctaccaaactctgatctcaaactttccagtgagacctaaataactgaagatgccccccaccccaccacccaggaggttgctacattcccacacagcttaatgttaaaaagataaagcttagatttttagaattccagtgagacagtaaagcagtgcactttgaagtgcatcctctactgcaagaactgttgcagatagtaacagtgtcaaatggcagaagaattaattcatatggtgataaagggaaacgatctttttttccttgtgattttttttttcagtagcatccacatcacctaagaggtttcaagaaaatgcagagccttctcagacctactgattagaacatgcactagaaccagattaatgatgctttatatataattcacatttgagaaatgctgctcaaaaccccacccgtgtaggtggcctgcaagtacagttcaatttcaatgaaaatttgggagacaggcacaacccaaactctataaatacagaatacttactatttagagctcacccataatgcatatttcaatattaaaataatcaacaactgacaacaaaaaagatgcttttaaaacaaagcacagcaactgtaattagtccttagtcacaataaatactaacttcccatacagaaatcatatgcatcagtgtccacaccaaaatcaatatttagaatacacaactttcttcacaagaacatagtaatttttttcattttaaaagctacttacttctccttcagattttacaccaattacttttccattctgtacaatgatttcttcaatgggtttattcagcatataggtacctccataaatagcacttagcctggaaaatttttaaaatcccaattaataatatatagttgtttcaactcctaaagtcccctttcttagatcttaatgagttacagacaatatacatttgttcaatttccttctagaaagatgtcagcttagaagtgattaaagcaagaaaacagagtcaaaaacacaaacataatcagttataaatacgaagtcaaaaaaaatcactaaccaggcacttgtctttcgagctgcccactcggccctcctccaagtgtactttctttccttcctttcattcctgccctaaagcttttcaataaacgtccactcctgctctaaaacttgcctcagtctctccttctaccttatgccccttggtcattctttcttctgaggagaaaagaactgaggttgctgcagacccgtacggattcatctcagcacggtaacatattttggtgcctgtgactcggctaccttccaccagcaacacatttggtgctgtgtgactcggatacattccctagtagtaagagacctctacacctcattttctttggctggaggcgttcaacccccatacacggttttcttctcccctttccactctcccgcttgctaaccaatcaccggaacagttcctctcggccgcagcggctctgcatccatagcttatccctcctcgctcaccctgatggatggctcttcggggtccacactgagcagacctgagacactaatggccctcctggacaggaggctcgtgagtgtggtgaggctaaagcctaaagccatgcgatgtctgggttttactctgcttcttcaactaaaatcggctctttcccaaaaccccacactgtctattctcctgtttttccttgtgtgtgtgttctaaaatggccttgtgcagtcgcgggactatccacatcagaggcaaatctgccatttctctggattcacacccaggggaaggggaagggcaagggcaagggcaaggccaagggaagggttgaccagtaatagctatattagtctaatcctctggcatataaataaaactatggacttaaaacactatcagaaggaactgaaggcagtggttcacgcctaatgccaccactttgggaagccgaggccagcagatggcttgaacgcaggagtttaagaccagccttggcaacatgctgaaaccctgtttctacaacaaatagaaaaattaaccaggcatggtggcactcatctgtagtcccagctacccggaatgctgaagtggcagcatcacttgagcctgagaggtcgaggctgcagtaagtcgtgatcacaccactgcactccagcccgggtaacaaagcaaaatgctgtctcaaaaaaagatagtaataaagtggggggaaaggcagcactggagaatgacttaaagcagcaaaaaccagagactgaagaaactcttgaaaggaaccaagtgggtgagagctttatgtagtttatatggttttcccctcaggcagcaacttccctagtccttgcaacatggtacagctacaacagaagcacaatgcctgcagtcctattgatttgagatgtgacagaatttggggcggccagaggagatgaaaattgtaggggaaagtttcacaaaagagggagcctcaaaagaaggagccaacaaatctatgataaaatatcttcaaatccttaactacctccagaagtgctcacacaggagggaaaagcgaaggaatccaccagaaataaacagctgaaaggctcaaagaggttagcagagattatagaggaaggacagaagaaaaaatgtgtctgaagtttaaaattgccatgttcaaaggagcttgcttactccagaggagtaacgtttaagaataagcagaggccacttgcgcgtgtgacgtcatggcaccgtgcgtggcagcagcagcagcgcaggtggcaggcccgtggagcagtgctggaggaggaagtggtgaggttgttgctccctctgcgccccgctgctggctcttgaacgcagagaggggccacagtccctgcggctgcatcgcgcttccctgcagtcccctccatgttcccctgcgccactgctccccttcctaaggctgccacttaccccggagtctatgaaaataatggatccctcaacctggctcatcaacagagcagatgaacagaccatttatcagcaactacaaagaagctatttcttgtcacaaaaaggctgcggcatatccttcagaagccgtgaagctgacagtctgagcaggctcatttttcactggaattgcaaaggaataggaaacagcgcctcctcatccaagacaggtggaaaagggcccagcgtgaaaagactgaaagcccagcagaacataggatgtagctgcccatctcacaaaccctctgctgaggatgcagagagccagagccccctttctcagaagcacagccctttcacagagaaatgcctgcctgagattcaagggatctttgacagggatccagacacgctactatttttactttagcaaaagagtgagccagcagagccatgtattagaagcaaaggcccgaaagataaaacaattatagagaagcagatttgaagaggcatgtggaattccttgtggctgagaatgaaagattaaggaaagaaaataaacaactcaaggctgaaaagggcagacttctaaatggtccaatagaaaaggagctggatgtagatgctgattttgtagaaaagtcagagttatggagcttgccgccacattcagaaactgctacagcctctttaacctggcagaagtttgcagcaaataccaggaaagccaaggacattccaatccccaatcttcctcccttggattttccatctccagaacttccccttatggagctgaggatattctgaaaggatttatgaataattaaaatggaaggccagagaagaggggagaagaggaaataatgcgaaaacagttaatccagcaaaaaaattaaaagggaaaaccacatagaagggtaatcccggaaatgcttcatctggcagactgtgggagaagaggcattgccaggacttggcaaacagtcactgtgaaatgtatctgattcactgactcgagctaatgattccaacttagtacacactaaattcatggaggttcagtttctccagatacaaaccaaatggctacatagaataattttttcaagcaacaattacttgtcttgtcttcagggttaaaatgcataaaagttatgccaggcacggtggctcatgcctgtaatcccagcactttgaaaggccgaggcgggtggatcacctgaggtcaggagttcaagaccagcctggccaacatggtgaaacactatctccacaaaaaatacaaaaattagccgggcatgatggcaggtgcctgaaatcccagctactcaggaggctgaagtgagagaatcgcttgaacccaggaggcggaggctgcagtgagccaagatcatgccattccaactccagcctgggtgacagagtgagactccatctcaacacagtcatttctcaaaagaaaacatttatgcagccaagaaacatgaaaaaaagctcatcatcactggtcattagagaaatacaaatcaaaaccacaaaaccatgtgagaaaccgtctcacgccagctggaatggtgatcgttaaaaagccaggaaacagcagatgctggagaggatgtggagaaataggaatacttttacgctgttggtgggagtgtaaattagttcaaccactgtggaagacagtgtggtgattcctcaaggatctagaaccagaaataccatctgacccagcaatcccattactgggtatatacccaaaggattataaatcatgctactataaggacacatgcacacttatgtttactgcagcactgttcacaatagcaaagacttggaaccaacccaaatatccatcaatggtagacgggataaagaaaatgtggcacatatacaccatggaatactatgcagccataaaaaaggatgagttcatgtcctttgcagggacatggatgaagctggaaaccatcattctcagttaactaacacaggaacagaaaaccaaataccgcatgttctcactcataagtgggagttgaacaatgacaacacatggacacagggagaggaacatcacacaccggggcctgtcaggggatgggggctagggagggatagcactagaagtacctaatgtagatgatgggttgatgagcacagcaaaacaccatggcacatgtatacctatgtaacaaacctgcacgttctgcacatgtaccccagaacttaaagtataatttaaaaaaaagtataaaagtatgttatgcataattaatctataatgccataaatgatcatgcaaaacttaaataatatggtggcccgaggggctgccttgtaattgaaacatgctttctttcatgcattgactatatgcattttgttaatgtgcattttgtttaaataagttgtgtaagagacacacctttctagatgaaactatacgtgtgtgccacactttgcactactaatgatcacctcaagactatcaggagaaatatttaaatttccattttatgaagaaaggaaccaaattattagttatgcttttttaaacaaattaccagtttacataattaataagggtgcattttaagttctaactttgtttattgtataatgtaccatttaaaaataccaaggaggaaatatcctttgcttttaatgatgcatgagtggaagtaatgctagttggcagtatttgattgtaagaaatcaataaattgtgatttaaaacaaatcagcaaacaacaaaaggaaaaactaaaaggacccactttaacaaggtgtaaaatccagtctccacaaatgcaagatgaacagtcaataaaaaaatgtaactgcctactcaaaccaaaaccaacttttcagaggaagaatccggcatctcaacaaactatcaattcatgtgtccagtatacaatccaacattactagacatgggaagaaacagaaaactgtgatccaaagaaaacagaaaaacaaacaacagaaacagatgcccaaatgttaaaatacgcagtttaaaagcagctattataaatacgttcaaggatattatatgttcaagaatatgttccagaacaaatatccttgttcaaagatacatattcaaggataaatatgttgttataaatgtactcaaaacagtcaagtaaatagagaatatcacaaaaatgaaaactataggccgggaacggtgactcatgcctgtaaagcagcagtttgggaggctgaggcgggcggatcacaaggtcaggagatgagaccatcctggccaacatggtgaaaccccatctctactaaaaatacaaaaatcacccgagtgtggtggcatgtgcctgtaatcccagctacttgggaggctgaggcaggagaatcgcttgaacccgggaggcagaggttgcagtgagctgagatcgcgccactgcacttcagcctgggtgactccgtctcgaaaaaaaaaaaataagaaaaaataaaactatagaaaatgagaactctagatctagacagtataaaaaaattaaaattcactgaatgagattaacagcctattgaaaatagcagaaaaggtcagtaaacttgaagccacatgaacaggcattctccgatatgaagcacagagagggggaaaaaaaaaagtttgatgctttttttttttttgtaagagacagggtcctgctctgtcacccacactgaaatgcagtggtatgatcacggctcactgcagtctcaacctctcaggctcaagggatcctcccactcagcctcccgaatagctgggactacaggcatgcatcaccacacccagctaattttttgtgtttttctagagacagggtttcaccaggttgcctaggctggtctccaactcctgggcttcaagcgatccacccacctcaccctcccaaagtgctgcaattacaggcatgagccaccatgctcacttaagcccagaagttcaacaccagcctgggcaacatggtgagactccatctctaccaaaatacaaaagttagccaggtggggtggtgcatgcctgtagtccctactactcaagaggctgagatgggaagatccctttagcccaggaggcagaggttgcaatgagccaagatcatgccactgcactctagcatgggtgacagagtaagatcgtgtctccaaaaaaaaaaacaaacaaacaaacaaacaaaaaaacagaccaaactataaatataagtgaacttaatgtgacaaaaccatctacaaaaaaaaaaaaaactatagaaaacatatttaatagtaaaatatttactagattccccgtaaaactgggaacaaagcaaggacgtccattctcatccctgcgacattatcaggaagtcctaacaagtgcaataaaggtaagtgggggaaaaacacataaaagttataaaagaagaatctctttattcacagatgacatgactgtgtagaaggataattctaagaaatatataaaactagaaaaactagtaagtgaactagtaaaacttaagtacaagatcataggatacaacgtcaacatacaattacatttctgtataccagcagcaaacaatttcaacataaaattaagacaatttcattaacagcagcatcaatacaaaatacattaacagcggcatcagtacaaagagattgaacaaaaatgtgatagatctctacagtgaaagctgtaaaacactgctgagaagaaaaccacatggagaacaatcatatttatggactggcagactcagcataattaagatgatcattttctccaaactcatctacaaatttaactcaatatcaaaatcccaacaagcatgttttctagaaattgacaacctgattttaaaaacgtatatggaaatgcgaacacccaaaacaaattctgaagaaaaagttggcgaaagtgttatcacctacttcaagacttaatataaaactataattatccagacagtgtagtactggcataggaaatacaaatcactgaaacaaaactgagtcccaaaacaaactcatatgtagccaactgatctcccacaaaggcaccacgactacctagaaaaggaagtctttccaacaaatgcagctaaaacaactaaatattcgtatgtaaaaaaaaaaaagaacctcaagtcttacctcatcccacacaccaacactgtctcaagatgaatcagatttaaatgcacagataaaattataaaacttctaaaaaaaaaaaaaaaaagacaataggagagtatttctgtgcccttgggggcaagtaaaagacttctaaaatagggccaggcgcagtggctcacgcttgtaatcccagcactttgggaggccaaggcaggcggatcatgaagtcagcagatcgacaccatcccggctaacagtgaaaccccgtctctactaaaaatacaaaaaattagccgggcgcggtggcaggcgcctgtagtcccagctactcaggaggctgaggcaggagaatggcgtgaacccaggaggcagagcttgcagtgagccgagacagtgccactgcaatccggcctgggcaaaacacccagactctgtctccaaaaaaaaaaaaaaaaaagacttctaaaataggacccaaaaagctataaacattaaaaaaattttttctttgatatactggacttcatcaaaatgtaacacttctaggccaggcactgtggctcctgcctgtaatcccagcactttgggaagccaaggcaggtggatcacttgaggtcaggagttagagaccagcctgttcaataacggcaaaaccccgtctacccaaaatacaaaaattagccaggcgtggtggcacatgcctgtagtcccagctactcgggaggctgaggcatgagaattgcttgaacctgggaggcagaggttgtagtgagccaagatcatgccagtgcagtctagcctgggcaacagagcaagactctatctcaaaaaaaaagttaacacttatgcttatcaaaagaccagccataaactgggagaaaatattcttaatacatatatgacaaaagacttgccaccatcatacaccaagatctcctacaagtcaaaaacagaaagacaatccaatctttagaaatgtgcaaaagacttgaacaatcacagcacaaaattatacaaatggtcaataagctcatgaaaaggtgagcaacatgagtcaagaaatacaaattaaaaccataatgagatagcatttcacacccacttgggcaattaaaattaaaaacttacaatactaaatgttgacaaggatgtggagcaacgagaactctcatacactgctgagtgtatacacaatgacacaaccactccagaacactgttttacagtttcttatgaattcagacttctatctgccacattagtcagcaatttcactcccagtatttacccaaaaggaaatgaaaacctatatccccacagaaagtgttttacataaaaatttcacagtgccttcattcataatagccaaaaactgaaaactaactagatgtccaccaaaaggagaattatatgctcatataattcatacaaaggaattctactcaacaattaaaaaaaaagaattggccaggcacaatggctcacacctgtaatcccagcacattgggaggccaaggtgggtggatcacttgaggtcaggagttcaagaccagactgaccaacatggtgaaaccccatcactactaaatataaaaaattagccggatgtggtggtgcatgcctgtaatcccagctccttgggaggctgaggcaggagaatcactggaacccagggggtggaggttgcagtgagctgagactgcaccacagcactccagcctgggcaacaagagtggaactccatctccaaaaaaaagaattactgacacatgcatcaatatggatgaatctcaaaaaatgaaaaagacacaaatgagaacatattgtattattccttttacatgaactttgaaaacaagcaaaagtaatctatagtgacagaaatcacagaggtggttgctggggatggggggcagtattcattatgaggtgacacaagggaactttatggggtgaggaaaatgttctataccttcactcaggttttagttaaacccaggacagggataggtctataaatttatcaaactgattttttttaaaatatatatagttataaaataaaaaatataagaatagctacttctgctcgcttctggtgtccatttacatgaaatatatttttccacccctttaccttaaatttgagtccttttgtgtctggtgaatctcttgaagacagcagatacttggttgatgagttcttatccattctgctattctgtatctttaaagtggagcatgtaggccatttacattcaacattagtattgagatttgaggtactattctattcatcgtgctatttgtttgcctgaacaccttgttttttttcttcattgtgttattgttttataggtcctgtgtgatttatgctttaaggagatacaattttggtattttgagaatttgtttcaagatttggagctccttttagcagttcttgtagtgctggcttggtagtggcaaattctctcagcacttgtttgtgtgaaaaagactactttccttcatttatgaagctctgtttcactggatacaaaattactggc

SEQ ID NO: 5673 - DNA, 401330 bp, Homo sapiens
  ANK3 gene - 61458165 - 61819494 of chr10; NCBI Entrez Gene ID: 288; Build 35; sequence includes 20,000 bases upstream of initiation codon and 20,000 bases downstream of termination codon of the gene
ttccacatagatgatccttcaagctgcgggcatggatgaggtgtcctaggcagagagtacagagtgggagaggagaagtcccaaagtggagactggatggcctctaatgttcagtgggaaagcaagctgttctgcatcagaaacagaaggagcccgactccttttgcaaaaggaactcttctgcaaaagctactttgtaagcttcattttctttttttaaaaaactaaccagtggaaagtgaatcagccaacttctttatgtatacatctttttacttaatcagaaaagaattcattgttttttaaacaaatgatacccacatagactgatattctccgccatgagctatatgcaggaatatttgcaataacttcttcatttcagaatggagaccaattccaattggtgggaaaggtgaaattaatgctattgtttatctcttggtctctccagaaatgggaaatttgcttttggtttgggtagcaagtttcatgaactgaacttgcaagcaatgcaagatgataatacgtggcatgaagggaggctttttctttttaatgaaacccataaaacggagaaatcagctgtaaccctcactgcagtgctagctatttctgttaatttaggaaaaagaaatttgaactcagcaggcaacttgtagtaaggattttcactttgccttcccagatatattgacatcgctgcctgcttaaggaggacaggagagtcaggcagaagccacataatgatagcgttgctccatgactgtttgttttctgaactccttactcttgttaattagttaatgtgcccagtgttattaactgatctcagaaccacatctttactcagaaggagttgagttcatataaaagcctggctgaggggtttgggaggggggaagaagaggaaaagaaagccaaaacccaactgtaagaggaaagcctccatatcaggcccagtgacggaagcgttttctgtgtatgcactcgggaagggatctcttgagatagcactttggtccccaaaggagtaaagagattgatactttcttttatgttgagatctttactgctcatttctctagagttattctttcttgttacagtttgtattagttcattctcatgttgctataaagaaatgcctgagactgggtcatttataagaaaagaggtttaattggcccattgttctgcaagctgtacaggaagcatggctggggaggcctccgggagctttcacttaaagcagaggacaaagcaggagcgagcatcttcacatggctggatcaggaggaaggttggggagggggtgccatacgcttttaaacaaccggatctcatgagaatgcactcacctacagtacaaagcggggacgatctaaaccattcatgagaactctgtccccatgatccaatcacctcccaccaagccacaccccaacactggggttgacaattaaacatgatggaggtgacaattaaacatgggtggggacacagatccaaagtataccacagtgacagagaaatcataagcagtcaggctgatagaatgtaacagaaagttcaaaatggtaagagtgtttcttaggaaagggaattccttattctattgccttccatggatttattccagagaagccagaaagaaaatgagaaaacatcacatagaaggtgggttggaaagtaagttgcctgagcagatggcagcaggggtaggggcaagtcagcaaaagttatcatcggttatccactgtgtgcagagtatgggagacacagtcagggcaggctaaggtgtgagcttcctcattcattcttcacagaaataatcaagtggcagagatggggcaaacataatagaaaagtgtagcatcattttgcattgcttcaaaggggcagaaattcattaaatgtgtgacataaaatatccagtcataatatttattgacagtcttcagataatttgctatatctgatctgtgccatttctgagccctatgtgaaagtcatttaatctctcttgagcctcagtttacacaatttataaaacaggaattacaaagtcataagatggtttatataaatcttggcatgtagcagcttttccgtacacattgatgaatgtataaatgaatgaatgaatgaattacttagcacagtgcttggcacataatactcattaaatggatctattattgctatgatggtattattttggtaagccattaaagaaggtggaagatatctcttcccttgtaacataacactcacatataccctcgcaactttgtccaatgatatattaattaagtgagaaatggttggataatttgcatcctcacaattctgtagaggagaataaattataattatcgctaacattttcctgcctccatttccttcaaggtatttggacagaggccagaaataagagcttaggggtgccacatacttcaagaaaagatcaattttcagtgggattttgaatacacagcttggcaccaagaaataaataaaataatgtggattatggaagtgacctgagagaaactcaaaagcaggggttaaccaatttgtttgctctagtttagtgtgagaaagagtaactgggactttcatgtgatacaacagagtagaaaatctgcaggcttctcaatgaatttctatctgaaagtttgcctagaaaatgcagggaaaatgatatatttccatttatagtgcaactattatagatttactgaacaaaagatctattatggctgattaatttggtcaaatgacattaaacggcttgctttcctgttataatttgcccgggtgaaagatttggtggcaaaaaatggtgaatgaggaaaaggcaaggtaatgaaaaaagacaaaaacaactaaaatttaccaactatctgctataaaacaggcactgtgctagttactttatgagagttagctaatttatttgtcgtaataaacccaagtgataggaaaaaccagattaatttgactctaagtcagtccttttattgataatctttaatgagaaaacctaacttatctagggcaggagccctcagcccccgggctgtggactggtaccagtctgtaggcctgttaggaaccaggccacacagcaggaggtgagccagcattactgcctatgcttcacctcctgtcagatcagcagtggcattagagtctcagaggagcacaaaccctattgtgaagtgcacatgtgagggatctagatcgcttgccctttatgagaatctaactaatgcctgatgacctgaggtgaaacagtttcatcctgaaaccatctcctaaccacccacttccccatccgtgggaaaattgtcatttatgaaaccagtcccttgtgccaaaaaggctgggggctgctgatctaggggtcagcaaactacaacccatgacccaaatctagtgcctgcctgtttttgtaaataaagttttattggaatgcagccatgtccatttacgtatcatctatggctgttttcatgctacaaaagcagagttcaattgttgtggtattatgtatggtctggaaagcctaaaatatctactatatagccccttacagaaagtttgatgacagaaaaagtttgaccccttttattgccctgacactttgagcaaggtcctctttgagagtttcttccacaagaaaacagagataatgttgctggccttgtctaatgtacagtgttacaaaaatgtaacctgttgtatatgaaaattatatgtaaactgaaaaagggtctaccatgtagtattggttgctttttctcccaacatgctgttaggagaattttcaaatgtaaaacaaaaaaagtggaagaatatacaatgaatgcccacatacctgcccttagattctacgattaacattttgctgtatttgttttattacctatatacattctgtcaatctctctatacattcattaatttatctttctttttatatatttcgatacatagatgtcagtaaaattcaccctaaacacattagcttatatgttgtcattaattggaggtatttatttacttttttcttaggtaaaatttacatacaatggaatgcacaaaacttaaatgtaccagttgatgaatgttggcaaaagcatatacttggtaacacagatctttttgagacacaaaacattactatcaccccagaaaattttctcccttcccagtcaattcccacctcactccactcccagaagcaacctctgttctgatttttttcactatagattagttttgcctgttttagatcttcatgtaaatggaacatacagtatatactcatttgagaaatgcttcttttactcagcataatatgctcagtaacagtaggggttttttccttctttaagattaattgtatgagtacaccacagtttgtttatccattcacttgttaattaacatctgggcttttattttttttgttccaaataaagcttccataaacattcttatagaagtgtttttgggcatatgttttctgtctcttgtggaaacatctagatgtggaattgctaggttatagggtaggtgtttgtattattttataagaaactgccaaatgttttttccaagtggttgtgcaatttcacaccctccactcacaacgtattagagttctggttgttttacatccttgccaacatttggtgttgtcagtctttaattttagcctttctggtagatgatagtaatatctcatgtcagatttcatttgcattagtccccaactctgtatgtattgaccaatttgtaagtgtctgttaaagtcttatgttcatttttaactgtgttttttatctttttgttttgatttgttggagtcacttatattttctggacactgatccttggacggatatattcttgaaaatattttcttccactcgtggcctattcattttcttaacagtgggctttgaagtgcagaagctttaaattttaatgaagtctaacttttttttaaattttgtaactactatattctgtatactgtattaagaaatgtttgcctacccccaggttgtgaagatattttcctatgttttcttctaaatgctttagagtttagtttttatgtctagatgtatgatttttcttggattacttgtagtgtgtaaagtaggagttgaggtttatatttattcatatgggtattctgttgttttacatgattttttcaaatgattttcctgattgaattgctttggtgcctttgttgaaaataaatcaatgatataagtgtaagtctgtttcccttgcattgatctttgtgtctatcttaatgccagtaccatactgtcttgattattgtgtctttctgtaatagtgaattttaaattcaggtagtgtcactctttcaactttgttattatttttcaagattgttttggatattcaaagttctttatattcacatacaaattttataataagtttgtctatttttttaaaaaaaaacttgtggtgttatgattggatcatgttgaatctacagttctgaggagaattttcattttaataatattggatctttcaatccttgagtgtagtagatttttaccttaatatagatctttaatttctctcagcaatgattatagttcacaatgtggaggatttacatgtctttcattaaatttatccaaagtactttatggtttttgatactttaaaaagtagaattgttctttttttaaattcgattttccaatcatttgcagccatcatacaaaatacagctgatttctgtatgttgatcttgtatcctgaaaccaagcaagatacactttttagttctaggagttgtttcataaattctttaggattttctgtgttaaccatcatgtcatttgtaaaaagagacagttttactcttcctctccaatcttgtggctctcttttctttgccttattatactggctaaggtctcctgtataatgttgaatagaaatagtaagagtgccaatactcaggagaatggtgtgaacccgggaggtggagcttgcaatgagccgagatcgcgccgctgcactccggcctgggcgacagagcaagactccatctcaatattaaatgaataaataaataaaaattaaaaagggccaatacttttgtcagtcttagaggaaaagcattcaatatttcaccattatgtgtaaatgaagcttgtattcggggataagcctcactttattaaatttgattttgctaatattttgtaaagcatttttacatttctcttgatgagagagatcagtctggggtgtgtatgtgtgcatatctgtaatttgcttactaggtttggtgcaaaggttatgctggcctcataaaacaaattgaagtgtcctcatttgctttgttttctgaaacagttggtgtgatattgatttttcccccaaaatgttcaatagaaaccaccagcaaaaccatataggtgtggaattttctttgtgtaattgtttttgtaatgattgtttttgtagtaatttcaatttctacataggctccttagattttccttttcatcttgtgtcagttttgataagttgtattttttgagaaatatattcattttatctaaattttcaatttattagcataaagttgttcataatatttactttcctttttcttatctatatgttttgtagtgatagtccctcttttatgcccagtatttgtgattcatattctcagccttttttggtatcagttacttgcactgcataacaaaccaccccaaacttagtggtttaaaataataaccacttatgtaactgtaggctggccactgggctggaatcagccaggcagttcttatggttcaggcaggttcccacaaatagcgtctttggttacctgccagtctgctaggtgatgctgctgctggggcttggctggctgttgtctggggtggggggtgatgggccacatgtctctgattatctaccaggctaacccaggctttttgacatggtagcttggccatgttcctaaacagaatggaagtgtgcaaattctcttgaggcctaggcttggactagtgcaaaattgcttttgttcttttttatacattatattgcctaaagccagtcacataaacaactcagacttatagggaggaaaaatatagttcaccaacaattccaagtgagtgtgcatataggatcatttatttcagtctcctgcatgttaaggcatattacaaatgtatacaccatttgttatgaatttaacagttcatgtaagtagtctaatgttaccatcaatgttatgatacagtaatcctcaggcatcctcccaggccttactgagcagtaaattctttggtgtctcatcaaaaccatttaccccgttaatacttatgcatttttttatttatattcttagttttataaatcatttattttggttatccacacaaccccaaaccagtatagttctaagctcttttttgatcaatattactgctctatgatccataatacttgaataattcaaaatgtggcactggtaaatattatcgtgaatattttgactttgggtttaaaaaacagcttgggttttaaataatttacagctgttaataagttgtaagtaaaatgaaacatagcatagataatatatttctcccggtccccattctgtctgccaactgtcacagaaaattcttggacagagaatatataagtagagttgggaatgggatgatagaaatacagtttaattccaccagtctcttcagtatatattttagcctagccgttaagtcaggttgatttcacctttcctgaaatctacctccagaaatttatcctaagttacttaatgggtatatgaactcatctggtgataagtggccatttatagcattgtttctctcataaaaaaaattggaggcaatctaaatgtgtaatagaaagggactggtttaaaaaatgacatgtacatcacatggaatattatacaaccttttaaaagttatagaagaggacttagtgatttgcatggatattcattatatatgttaacacataatacattttaaagtagattgtaaaactacttgaatgattatattcttggtaaaatagttacatttaaatacatataaacataaagagatgcttgggataatatacaacaaaatactaatggtactcatttctgaatagtggcaatacaatttttaaaaaattcttcctagctgaaattttccttttatttatcctgtgctttttgagtggcagttttaaaattttattttattgtggttaagaacacttaacatgatctttgcactcttaacaaaatttgtaagtgtacagtacagtttagtatcattgcctatcagtgcaaagatatacagcaagtctctagtgcttattcatgttgcttgaccaaaattttatgcccattgattagtaacctccatttcccactctccgcagcccctgagaaccgccattccactctttgattctatgaagtagattgttttagatacctcatatcgtggaatcatgcagtatttgtctttctgtgactgacttatttcacttagcataatgtatattttttgttcttctgatttttaaatccacgatttgaaatttttagaatgaatatatgttgaaggcaggaaaaatgaataaaaatggcttttacagaaaagctctacacagccacagttttcaaaattatttttatttttttgttgccaccctcaatgcaggaagagctcttgagctttagaaagcctgcagagtcacttcacacactggggcctgttgggaagtggggtggggagagggagagcattaagaaaaatagttaatgcatgctgggcttaacaccttggtgatgggttgataggtgcagcaaaccaccatggcacacgtttacctgtgtaacaaacctacacatcctgcacatgcacccaagaacttaaaaattaaaaaataaataaaatataattcaagatatgacaggaaattcccctaacctgaagcaagacttgtttctttagaatctaaaggcaaactgcacctgcagactgcacctgcttttataaataaagtttttattgtaatgtaaaaaaaaaaccttggaatgatctgcttatccccaagactggttttattgccaccttgatagaatatgctatcatgaaatgcagtagttaccttaggattgttgtttctgctgttaatactcacaagtactcataaagtggggcaattctttttaaataagcatgatttcttttttatttgacattactgtgagaaagacttgtaaaagattttggttggaagccgaatcagcattcttattcctttcccataactcctattcataggatctgaaatctttttaaaaactcaaattggctagaaaattattgttaaaaatagacacaaatatcgcatctgttttaaaccactggttgttatcctgtgcttgtctcaccagtctgactgaagagctcactgacaaagtaatatccattacacatctgtagtaaaatggtatttctatttagcaaatcccactgttatcactggtgtagtacagactttagccaaatcttactagattttagtgccatggctgcacacacacacacacacacacacacacacacacacacacacacactgtattggaggttttgatttatattttgttttcattgaatagattgttcaagctaattttcatctagaaaagggctaatgcaacggacactcggtaatgcccagggatattgaaactttctgtaacccaaattaaatttgatttaaattagatgtatgctggaaagaatttttagagtggagcaaagtgttgcgatatcaccacctctgcagaaaagaccacaatttaaattttttcattaaattatttggtttgttgcgggaaggagcaaaacctagatactgattactgatggctaagtgtacggagtttagtgcaagctttcttgtgccggcggaagcactggggcagattcagtccacctgggtaactgtagcggctccttgcctgcagctccgttgttcaggcagcttgttacatgtcaacacctgctcattaggaactggaccaagactcccagagagctctccgatggccctggttttgtatccctgccaatctgcgctagaatttaataacaaccttgaggtgaaacttgggcctttcctcattgctaatccccaaaaccatctggcccttccctttctctgaataacaattttgtgcatgcgtggtgggagggaggaggatggggtgagagaaggggaacaagcatcttacatttcttaaaggacaatgtattcactttcagagtagatagagtttcttttaggtcacagacctgagctcgttctttccataacttccacatctttaatggccagataattgtttaaaatttgcaacactcattaactgttgacaaacctccaagtttagtttttttaatgaaataatgccaaaaagaagcctgtaagtctgtaatcatgattctgatgtttaaaaagattatgcattttctctttaattttccactgggtttagtacagtattacatacataggcgataccccataaatatttatgtattcccatgtgttgccctaaaagtaattgaagtaatttatgtgctctacaaagtaattgaagtaagatatgtgtcgtatataataggaaattacaaataaaatataaagcatcagaacttcctatgccctctccccaccctaggggaggaactggacatagtgaaccagatatgctatgtattgcatacagggcattgtgtttatgacactgttagaggttcactccagggaagatgaccattgagtgaatgccatatgcaatcacctgtactacttaaaattgttttcttacttatgcttgctgaccatttgttgagtttgggtgtcttaaataatgtttggattatgctgcttcattaaagaaggtacccaataaatatttgttaaatgagtgaattaaagaaacgttatctgtgtggacatggtatagaaaatgtacatagcaacatacgtttttccatcactgaaatgtcagtgatcatgttcaaatccagaggacaaattttcatgggtattatgtgaatacacacatccacacatgtatacatacatgtatgcatatcacatatacctgtgtgtatatgcatacaggtatgcacatatacatgtatgtacacataaatattccaagcatcaggttttgaccatgctgtccattcaccctttcccaaagaccctcagaatgatatgttattaacaatgtgctacctcagaagagcagtcagcaaacaggcctgcaggccacatccagccttattttggtatagcctgtaagctaagaatgttatttacattttaaatggttagaaagaaattaacaaggagtatatttggtgacacctgaaagttatatgaaactcacatttcaatgtccataaataaagttttattggattagagagacattttgatacccttacatattgtctctggttgctttttcacagagtccattaggtgcaatagagaccacctggcctttggagcctgaaatatttactctctggccctttacaaaaatgtttgctgactcatgtcttagaagatacaaaagataagtaggatgaaatctgcctgaatcaacgaatacctcacagtattacaaacaatgctgttcactctcagcccctttttaaaagatattgggaaagaatgaaaaaattgttctcgagttgtattttttgaaaggacctcatcacctttatctccaaaacataggaccttatattccagacagactgttttgaatattcaaactttaatcgttcttgtgattatattggcatgatctaatggaagggcaaggaaaaagttgcaaagttgtggaacatataacatgaaactcaattagtctgattccaatttgccttccaaaacaacatgaaagagaaaacctgctaacacttgccaagttcaaggacaagtaggaagagggtgaatcccaaatctactcaggaaccctgagtgccaatctgtgttactgtctccccaacaagatgatgtcctgtgtttgcgtgttaatgtttttgttctctgtgatgtccgtcttgcttcatagacattgcttattgaaacacactagtaagatagggaagaagcaggtgttatttccactctacagaaggatgaggctataaactctacatgtagccctttccatggcaggaagtcagttcattgctaaatccaagaaaataagatgtctttttgttagacttaaatttctgcatggtggatatgttccacaatatgctaaagaattattatctgagttttagtctgaaatttgactgattttcattatagcatctggagtagtgtttagtttttttttttttttaatcctactataagtatgacctcctaaatcaacgaattaaatgcttcattctctagagataagatcctttgctttcttatatgtgctgctccattcctcctacacagagtcagcaaatgattcctgggccaacagtctcctgaatcttcaaatacaatctcctttgtacctttgcctttaagttgcttcttgaaagaaatgttttgaaagtgaatttgctttccttacatcttggtcagaactcactaacataaaaggatgcaaaaatcaatcacttcatccttactgtaattgtatttcagcatcacagcgtgtatgttgggagagttaagaattcctttcatgttacagatacagaaacagaaactaggtaggataaggtctctgtaaggtctcatagctacttagcgacaaagttggcgtaagagctattttgccttacttagttactttcattatatttccttttggccagcttaaatataattactatatagacattaaattacgagagtttattgaattatcagaagaaatcatttcatagaatgttacatttgactatgaaacaacaagacttatttccacaaggtacacaggagaatttatttcattactcagtggttatactttatcagtctttttgaattgttattaagctataagttaataaaggtgatggaaactataattatacaaatagtttaagagataagtgttaccaaagcatatctattatcttcagtaataagtatatttgaattgaacacattacttgagaaaccagtcagtcttcactattaaatgaatttcttggtttagagggcaatttttggagaattactaccctaatagagtgaaatacctgattcagctggctcctcactgtcttgatttatttttcctggggaatgtaaacatggaaggaagcagagagttcaaaaacaattgttccctatctggtcactttcaattcacccatactaatttattttcttcatagcacttgttactatctaaaattatcttgttcatttttttatttgtttactccctggctcgatattcaagaattgaagcttctgaaaaggggatcttatcggcttcattccccattgtatcaccagcactaacagtagtagccagggcgtaaagggagttttgtattctctgttcaggttatgagcagttgggcatgttgactagaatatcaaggggtcacttgtgaaattgtaagtttcatgggtagcgaaaagagatctgacctagaaagcattgtgctgagtgctgacctcttcattctgttttacgttaccccatccctgcttctgtagcacctgtctgtgtgttctaattattggtgtccttgtctttctcgcccatggaaacttgagggcaaggaccaagtctcatttctctatatgtccctggtgctgaacacagtgaccagcagggtgagggaacacgtccatgagcacacgaatgcttctttcggcacaagtgcctgaggacatatcttcatgcctcacctctacaaaagaaagaaagaaagagagagagagagagagagagagagagagagaacgaaagagagaaagaaagaaagaaagaaagaaagaaagaaagaaagaaagaaagaaagaaagaaagaggcatagtagttgattgctaagtgttctctgcttgtttgatgaaacacctgccttcaggaagacaatttctgacagatcgggctctctttttgttagtactgtgtaagttctttatgtagacgagtgctgtcgagtaggaatggagtgtaagtcatgcatctaatttcacatttcgaataaccacatttaaaaagctttaagaaagtgaaattaatttaataatatgttttatttaactgaacacatcccaaatattatttcaacatgaatcaatatataaaatcattgagctactttgcattttttggtactaaatcttgtaacctgttatgtattttacgtctcaatttggatgcaaaatttttgtcagaaatatttgatctgtatgttatatcataaaatttaaagttagaaaagtagatttgcatatccaaattgttccaaacacacttgcatgtgttctagtatctgaattgaatatcaattttaatttgaaattttaaataaaactaaatatttagttctccagttacactactcacatttccctaccagtagccacatatggctagtggctactgtattggccagtgcagattatatataaactctgcttgaataaaacttccttatatatttttttaaatttgcaaacacccaaaccctcctatcacatcaaatcacagtattctagaagagtgaggactgtcatcgaagtcatctggtccagctgcctccttttacaagagccagagcacagagaggaagtggcatgtggttcatcttcctcccactcctctcttggtgcctgctttgcactcagaactctgccaggcactaccagtctactcctttgggttaaacagacaccacagatatggttgtgggggccttctgtgtgcaacggaggatctcctcctctctgcaggccagtgtgggtgtgatggagagaccttggggaagcctcctcatgtgcctgttcctgtctgcccatgtgaggtcacagaggcagctggcatgcttgggaccagctggctctctctccagcactgaggtcaagctggatagtcagatagatggggaaagagggcagactaagtgctaagacagatggcaccaaggccagtgcttgttatccagaggtgccaccccctacaaggggtgtatgaatggctaccagtccctcaatgctatccagtcacagttttttaagaacttcatatgtctcatctaaaagtgaaaaataatatgagactgtgaattaaaaattttccaggtgtgttttttattttgtcatttataaccattgacaagtttagcgcttgttttctttccttttccttcaccttgttccaaacctgctctaggtctcttgatatcatctaggatgccaataattaatgaaatgatcgtggatccggatttctttgtgaagaagaaatattttgactatctcttatggcgaggctgctctgcttctgagaaaactgaagtgggtgcagcatgaagtcgttctcatttcatcaaaacacacacttgcctcattaccaggaacctggattagggttgaggaggcacaccctccctggcagccctggaaccatttctctctttagtttctttcttacttccatcttccattattctatatactccccatcttctccttctttatagtacagtgtaatattttttaaatgtgcacagctcttgtaacttcaaaatccccaagtgacagtgtcatctctgtggaaaccgcatatgttgttattagtttgtgtgtcaactcagctcaacaaggtagacacacaacatgaaatgacaagagagagtagtcaagttattaattggctgaattaatatttagagcttttcttgaaatcctggaaaggtgtatgtgaaaaatgagcggggagaaatacttggctgtgatatctaaagtctttaaggcatcctaatgaactgatttggctttatttttggtggaatatttagtcacaattgtttgattcctggattagatgttatctggagtatgcccattactccatatgcccaacatggaaagatatttttattgtttttatagaagattcatgctctaataatgcccaggcgggaagcactctacatgaaacttgttagttctggtaataaattaaaaaaaattatttcggacaatttttagcagggagaatcacttttttgacataacttctagtaacaaagctgcaagcagggaaaacactgagactctttggggcagtatggtggctttcaaattgtgctcaccaaagctgccttctggaggagggctgggagagccaaagagctggggctccaggataccatttttccattcagccatgcagctccgctgttatgtttattataagtacctttcctgtaggacttatttgaagaatgatttcttcagctaataaaaatttgaaagatctctctgtactacattttggaagcatggcttaggaattcttgtacctgggacttttataaaacaagaacagattttttctttttttcttgagaaagggaagtcacttaagaatttttgtccttagctttttttttcttttttgggggagggagtggggagccaagggacagagccttgctctgtcacccagactggagtgcagtggtgtgatctcagctcactgcaaccaccgcctcccaggttcaagtgattctcatgcctcagcctcccgtgtagctgggattacaggtgcacaccaacacgcccagctaatttttgtatttttagtagagatggggtttcaccatgttggccaggctggtctcgaactcctgacctcaagtgatctgcccacctcagcctcccaaagtgctgggattataggcatgagccaccgcgcccggcataccctaagcttttaatagctttgacattccgtgcatgggccacgcccatcctatgtaaatcctatgtaaacattctcatggtcaatggcaagtagtaggactggagaagttgctgtagagggaggtgaccgtcggcctgactggaccttgtactgttgtttcctctaaggccatgtttgcatctcattcttgttgctaccagggatctgccccacttctcagacacatgagcttgtaccagttggacgattggttgtactttaaagattcataccagtttttaatctcccaaatgaccataagttcttgaaatttaagtggacatttttgataaaactttagtcaaggaataaagtttttaaaagttgttttaatgttttcatttcagctataataaaggctttctggaactattgataaaactgtcaattcagttttggggggaaactggcatttgtggctatcttgagtcaatgcctttgtgttgagaataagtacacaaggagcttgagagttacttgtcaggatgtctgctgtgtagggagaaagggatttagcctttagtaatatcacagtcaaaacctaggacccacagggctgcctttcttagtagagtcactgttcaaagttctagtttagaaatggaagataaaagatcacattttctgttaaaaaagtaatctgagcaagctataccttaggatttatttttgatgggctaaccacttactgagataagggaaaatccaaggcaacaaaaaagtcacattatagagtcctaaaaagccatgacacattctcaacttctgaacatttgggggaagcaaagagttattctagagagaagtatgttgaaaaatacctgtggcttattttcctaatttccaactatacttttgccgatagaaatcaatgagaaagtatagtgctttgccagcctcagacggagaagttacttgatcaagcacacttctaaatatattttaaagtatcattagcgtctataaagaaagaaaagatgatccaggagccagtgggaaagacgccagctttttagctggctgttctcttcaacttgctgaaaataaaagaaattgtatgaacgtttttcaaaagtataagacgatttatattgggaaaatgcatacgaagttttaatttttactctgccccagctgttactaatacagtaaaatatcttagtagaaaaacactcatttttactacaaagacccaaatacctttcatctgcttttggagctgaattacatttaatcccccaccttcatttttctccatttttgtatggtttcataggcaatggagaaactttccagaactctttcttcatgaagatagtttgtgtggaagtcaagcatgtgagcatcggtgcacatagtaggcccttggtaactctatgaccagcgtggtttccctgtggttcaccgtgaggcctcagagaagtgcgcagtccattggtagtaggaatgggatgccatggtccctgattctttcccttcccatttttatcactgcttcgcagagactataaagcgtcctacaagaggaaaagaggaaagacctttgaaccccaaatctagaagtatggtgagtaaaagttgtttgcaggaactcacacttggcactctttgtgaagcagacaaacaacagctccagagaaccccaaccaaatcctcacatgatgcattggacttggtgctgtgtcctttacacacctacactttcagccctacaaagtcaaatgcaccgaccgccaaagttatggacttttgtatcggaagcacacatgctaacaaagtattttcatcagaacatcttttttttttttctgactcattttcttggtgaaattgttgtttgtgtgtgtgtgtgtgtgtgtgtgtgtgtgtgtgtgttcttttttttactaggtctcatatgttttaggcccagcctgacatttcagcagtttcttgctaaagcgcttactgtgaatactgtgtagtatgtgtgcaaatgactcccgacttattagatttcttccggtgtgtgcatcctagcagaagacaccccagcaggccttgagcactgctgctgcttcacttcacataatgaatattcagaggctgcagtcattgagaactcaggtggcaaaaatagtaaggtgattgaagcaaaccctaacatgaaagcaaatctgcatttcagtgactcagaaacactgattacagcacagattcctgaccctcagaccccatgagaggagagtcctggggaacctcctatgaatcaggcatctgttccatacaccaatatgctcacgtctttctgtatgatgtgttgtaatcagcatgttgtttttaaaagacaacaagcccttctgtagtcctccccacaaaatgcatttagattgatagttcagcataaaggatgcactgttgagacaggcaatacatgcattgttttccctgtaatgcagtcaggatctccatagcaaaatttagtgtgttttttgaaatcttattttatatattttgtcaccatcagcagttgaactaaagtaggaacagctccattctatcaggggttaaattattctccgtgtagatctagtggtgatgtataaattgcagccttttctttttttcaaaggattctaaaataggttttcagaattagcgctggatttttgcttctgcatgtgtggtgactcttgattcttcccctttggagaagcatcctttgcagcattcccccttccgaggaatcacttagacacttccagctggtggcaggggatacagccataatacagcttcctctgtcccagctgtcttcttcactacggtaaatgcattacgatggctgcactctcctgtaaaggttcaggtagaggaaggtgtaggatgaagtccggacaccatcatttgggtttttaaaagcttcagcttctccagcatctttgcattgtgaatatcttcctgcttctagtcaaagctttctctctagtgattggaatgctgctgtaagcctgattagaggtgcctgaggatatcaccttttacaaggaagccgtgtgtgcttgagaggatctttttaaatgcattatggctcatgcagcctcacaattaaagaaaaacagggatttagaaatcaatgctgaagaagagcctgagaaaaaaaggaaacaccgcaaacggtcccgggatcggaagaaaaaggtatctatgtatgccagagcatatatcttgcctggattctttttgttttaatctccctctggcatctgttagaagcattaagggttatttttacatgctgggtagagtgtaaattgggtgtgtaaattgggaacagatgataaaccctatggcagaacatggccataggatgggcaaggcaagagggacggttttctcctgtggggtgattgcagggctatgcggaaagtgtgcttcactttatataggcatgggcatgtttccatgacatggaaaggtgctgtgagggagttacaaaagtagtttcttcacagcccagtcaaggtgaaatgcactgcggtgacttgggttagagggagaggccagagaaccaggctttgtacttcttagaggtttgtctcgtggaaaaagagcttttgtgctggaactgtgtcacatgcgtgcgtttcccaggcagatctgtgaccttagaggagtagcacaaaagtcatttcctgctttgcttttatttcctctttctttccttttgcctcttatttttataaggtgctttttgtcaagttgtgcaatggaaataagctgctagaaataactttcttttgttaaataaagctgaaatcacagaggtttgtttttccctgctgggtgaaagtgattatcctgaacgcaggaattccagtaacctgcaaccttcaacactgattgctttagatcaaagcatgggcattgatgattccttactgatattccaaggcagggggaaaataggaggaatattctgggtcagtggtgatttattatagcccgtgagtacttagagtgcccttaaatatgactcctaggtactgagctgggagtaagaccccaaagcacttttcctccatgataattaataaaaattgactaaaactctgtgatctgaataggaaaggcaggtcataaagcatttttatgtgtctttgtgaaaattcccaaaggaaagatatccttaatttgagcagtaaggcatgtgctttctaaatgacatgcagattgcatctcccacatgtacccctcttcaggagtgaccatgaatattcctggtacctttgccattttcttcagagttaggatctatagaagactctctgccttttgttgcatagctgactttgagattgaagctggagagctgcagttgtttcactgcaagatgttaaatatagatagttcctactttgatattcttgtaaataaacttcttgaatatattttcataaaaatacaaacttgggttaagaaattgtgtgcaggcgtatttcaaagccttgcacagcacagttgttatgaaattgccatactttgctagattctggtctaattttattgtgtgaggtttctctgtgggtaggtcactaccacttgccccctgtccatacatctctgcctacccccaccgtgataaactagcttctaagaaagatggaaaaggtacatatatttgtatgaagatatggtgtcatattaatattgacactatattttagggttgttaggctagctaggtttatgtacagcagttttcggtagcagtgatgacagatctgttacctttgtgcctgggtccctgtttgacttggaagcaaaatagggaaggggtgaggcagagggagtttctggactcaatgagctgtagcaaatgctttgtggaccaaagtgctttgttaccagtacaacagagtctgtccaatgtaaatctcttagcaaccagaagggaacaaggagaaatatcaatatcgctattgtaaatgtgcaagtggatttaaatgttttgttctcaggacactcacagagtagatcctaaaactggctcatggataacactttcattgctgttgtacttgttaattcttaacatagtaaaataggtatattctgtaagatacagtgtattacagaagatataatattcatagtccaattatttcatatactacttgtaatgtacaaagttaagactgaattattttgaaaacactctagatttccttcagtggcatagccatatatgaccctcattcctctataaagtgaattgttatgactttgagtttctttatccccacctttttctaagatcctgatgaaggcctatgggctacttcgttccatgttgtagacctcatgtcaataaaaaatgctgcttctaaatattttgtgggttattatggggatagttgctcttgttcatatgcagaaatattgtataggatttttttttttttgagatggagtctcactcttgttgcccaggctggagtgcagtggcatgatctcggctcactgcaacctccacctcctggcttcaaatgattctcctgcctcagcctccttagtagctgagattacaggcacccgccaccctgcccggctaatttttgtacttttagtagagatggggtttcgccgtgttggccaggctggtcttaaacacctgatctcaggtgatccacccgcctaggcctcccaaagtgctaggattacaggcgtgagccaccacaccgggccaggagcttttaatcacataaaagtaatagtggatacgctcaaaagcttgggaaaatcctaaagagtatctagtttataaaataaggaatttggtccatgacactcctgcagttcaggtttgagcaaggccaaagacgaagctttcttgattaggtgtgatgacacagaatcgtatagtatgggatatcactatgtgttatcatgaaatcataatacatatgtagacttaacattggattcacatttcatcaagtttttaaaaactcaatgaattatacatatggtctattttgaatatgttaatcatgagtacatgattaccagtccaaaaaaaaaaaagcagtacagaacttctaggaatttataattagttgagttttaataaagatgtgttttattcttgacataacttaagtagtgttaagaaaaaggaaatcttcctatttgttgaaaggaaatgcgtctaggtggatgaaactttacttttttattactaatttgtctggcttgaaaaaaaaaagtttgaatgagtatcttctttaaaaggtgcttatcaatgcacttacaaatgccccttagccatactttcccactgcccttccctgccatatctttttcccttcacacttctctgctcacgggccgcttaggttggcaaccagtgggaggcatgccaaaagtagatagagtgcctttgggtgggttattactagatccctgccctgactgagcaagtagctgagaagagctgtttatatcccctgctcccagcagggccctggtccatgagcagtggttggtaggtggctcatcctaccataaagccatgatgggctgaagtcacacgtgctctctttgtggtcaggctgcagtcctagcacattgactgtcgttgttggcttctggtaccatgttacctgcgtgtcatgccctctccccacatacactataaaatacgtttcaacagtgagggatattactagaattgaccctaatttgttccataagtgggttttgttagtatatgaatacatgcttgtatatatttaccaagtcctgtcaaaaaatttgaggtgacctaatgaaatttatattaaaaaaggaaacattttggagtttgctctcaacagataggtaagtaggtaggtagatctctctctatacatgcgcctgacacagtgctagatactgggataaaatgacaattaattccatgattaacatcttttctgattattgatgtcaaacatacagttaatcagtgacagagcaggaacaaatattcattgcttcattcttgtattcatgtattcattcagtaaacatttattaagtgacttctgtggatcaggcattgcatcaaatgttggagacaaagccaatcaaagcatagtggcaacactacagtaacacccagaagaggcagggaaggagaaagataagagccactaatcaccctccatagagaatgaagagggagccccaggagcccacagaaagaccctcacctggctcagatgcactcagaggagaatctcaatgaagctgagctttggaggaggagtcagcaagatagtcaagcagaagaacaggagtctcatgcccaaagtaacagaagtaggagagactattaggctgtgtgggaaacagtatttttgaattcctggagcaaaggggacctgagtgtgtggcacgaaaagtaagcaggtgccagagcatgaagatcttcatatgccatcttgcatagtttggaaatcaccctgctcaaagcggggagagaccttaatggtggtggtagaagagaggactgtgaatagctttatggggtagagccatcactcaagcatccgtgttgtagcagcagcagcagggagagcagtcaggaagctctgatggggatccaggcacgaaatgctgagtgtgaaccaaggtggagactatgccagtggagagggggtgttgcataccaaagatatttaggggaagactcagtagaacttggcaatggattgtaggcaggatgtgagagagagatcggattctaggataactgccaagttcctggcttgaaggggaagaggaagaattaaatgtcctggattcatgtcttttctcccaggccatttattgaccacttattctacactaggtagggtattacattgctttataggtggagactaatttagtcttcctaataaccctttgagaagagaaagtatttttttattatccccatcttacagacaaggagactgaggctgagccttgaagctagttgcccaaattttcaccctagtcagacagtggtagagctaagattccaatttggacagtctaactctctagcttgtgctcttaactactgtgccatacaaggtatgtagtatatggcattaatattttcacagctacacatcaaagtgggcttgtttcagaaaatcttctaagtaataagctattttctagacatgtgaaactttaaacgacaggctttatgtctctaattcagtattgtagtgtctgtttttcttaccctctgcagtaaattttaatgttttttcttaagattcttttttaaaattttttggaagttagaaatgaaaattaccaacacaaggatttcaaatcctcagacacattgtgtaatgacaacataacagtgtgttagatgcctgttgtatgtcagcaatgtgcagaggattcccatgggttattcttttttcttccctatgactttcctatgaggcaggcattattttcatctccatttttgtaggtaaaactaaggcttaaaaataccttgtctgaggtcatatagctagtgattggtggacctaggcttgaacttgggtcaaaggactttgggttctgtatttaaccactgggtttattgtaatgagatgctagcagtctcttttaaggtcagccacaatataagggtttgagaacagattttttaaagacatgaactatactgttatttcttgctattgaagctcagtgcttcctgatgttttacaggctttccccattcctaattacctgggtatctctgacaccctaagatgccaggcaagagtaaggttttgtactgcagcagctggacttttatggtagaagattgtgtagatctttatgagatcaaggaaacttgctctgttccctgctgcattgagtatatggactccaggtctccagggagcatggtcaattagcatacttgatattctgtaccataattatgtgtttacatgtctgtcttaccaagagactatgagctccttgaggctggagatggtgtaattatctactacaaccaaactggggcttgctgggtggtgaatgagtgtatgagaggcagtatcatgtaatgattaagagtgtgaactatagagtaaggttgtctgagttcagattctggcactatcaattagctgttgaccttggggaagttatttagtctctctgtgcctcaggctctccacctgcaaaatggatgtaatagtaggatgtgcttaggatagggttgtaatggggtttcagtgagttaatattaaaacagtgcttggcacaaagtaaaagccatagtgttgttgcagttgttgttgttgttcagaatgtacagacaaatgaacagaagaataaacggactatagtgtgagtatttagtgttagccaatgtactgagtcattaaccaaagttgaggtttgtttatgcaacttgcctcaggtcacagaaatacctggtcttggaaccaaggcctgtgtggttgtaagtttcttgcttgggccatcaaaacctctacaagagaggttttcttaagggtgattcttattaatggacatccagggtgaattcttacatcaagaaaaaaattatcacttttgagatgttgaaagttaaattatttactaattcaaattttaataaatcatttaaatttaactgcaaaatctagatttgtatattcctttatacttagtgtacttctgcatttaaaattttaaaatagaatccatttactgaaaaaacaataaaagcattggcatatatatatatatatatatatatatatagatttaggtataggttaaatatcgaaggagaatatctaaatacaacattatattgtcagtcacataattcaaattttattttcaagaaataacaagcaatttgctatagttttgcccaaattgttgttctagtttatattatgtgaattgaaagtagaagagttaaaagcaaaccagaggacatcaagcttgaatcattcacatatacgtcagagttttttctggtacttattccattcacccaggattctgctttcatggaccaaagtggagtcatgaaatgggatcgtccattattgtcaaatgtgggaggtgcttataaaatatatagatttcaatttagatttaattggttctggtaaatgatttctcagtcatgggtgactttctgattaattaggatcatatcctcagttttgtctgaacttagatgtatctcattagaatgggaagaacagagactaccattcatatctgctggatatagcttaccttttggcagaagaaaaaaagtctactaataccatcaccacaggagaagaaggatgtgtggactgcatggtaaaaaatggggaaatagaactaggccctaagagggttggaaggaaggaagttcaagattttgtaggtactgaaagtcagagacactgaggcatttgtaaggtaccatgaaggtacccctgaaatcagaaataccttgtcttggaaccaatcagatgaatagcattcttttaccctaataaagtacaattttgtaagacatctatacagtgaaagaaagtatgaaaacatggtaaattttgtttaatagaagattagaaacattaataaaacaggcaagcaataaggagcgatgtggggaagtatctgggcctaagcattacaattcatggtattgaagagaatgggccttgaggctcaatgtgagttcacagagaagctgctactaattagctgtgtggccatgaactaaatttctttgggcctcagtttgcacattgatcaaatagggatactattttttctttacatacatgttgtgaagagtagagatactgcaaataaatgcatttgccaggttccttgcataaaaagagtgtatttagcaagtttccagcttcccctcctaaagtacaggttcttaaatgtcattgagggattgtagtcaagaatgacgtggaagaactgagaaaaagagggaatatttttaacaacttttgcaccttataagcactcgaaattatttgctgaattgatacagtgaatgaagttttactaagagactgtcattcccaaacaaccatttaagtcccacagttagctctttgcaaactttccacagccctcagggaattaaatctgtcattttgagaaatactcctgaagactcatatgttaaatacatttttctattcattaacaatagtactaattagcttatctcagtagctaaatgattgctgaggcaggtattaaagcttaagaaccctatgtacagacagaggaagtatcaaatgattcctttaataaatgaactttattttgcacattcaaacataaatgttgaaaaaggaaaaaaaaagactgcttgggttgaatgaagaaatcttcattatatagtttatgtattgtgattatgtagaaggaacaaaatattacttatacaagataagattcattaccaaccaatttatcccccaatctaggcagtgtccatgatagaggcattgttacagttttgggacagtcggggactgggagaggaatgaataatctgaccaatgtagacttatctgttgtacctggtttctgaacctaaggtggcccagtggctgtcttcctttatcggcggattcccttctccctgcgatctgattgctacttgcaagagcctctaaaattttcaatcacatatagctagttaaccttcacctgaccaaactggcccacttccataactgccacttagaattatcagtgtattcaaacgctcccacttgtcttaaacaaaacagaagaagtgagtctgaaacctggacatctttccttagacattttcatcatagaccctctgtgatttttttattgcaggaaggtctacccagtgatacatccaacagcaaaagtatatgaagcagaatttacctgtcctgttatttgttgggctataattcattgagggactacagtgggccaggcattctaccacatgcatgacgtagatcattgtattgaatcttcatggcatggatattattttccagttttctggattagggaagttatactctgaaagtttcaaaaacttgcccaaagtttcacagttagtaagtgtaaagctgtaattcaaaccccagttggtctgatttccagccctgtgctttttccaccactcttcacacctggaattgcctctatgtcacactgagagcatcgtttttacagaatactgagctccacgagatgagtctttcctggaccatgaaatgccatgcaagggttcctccccctaggaaatctcacatagaatcctttttgtgatttatctctttccccctaaagaacattacagaacgggatgtagatagtaggagggtgatattactggatgtaataaataaattgactcaacttcaaatgacttttacttcatttactggaaatgtattctaccttaacagtactataattctattaatgctaaaataaaaaatataaatatgattaattcccaatgtttgtatttttgaagataagtggcaaaatcactttgtgtcagctgatttggggggggttcttcgattttttttaattgacaaatgtacatattcatgaggtaagtagtgatgtttcaatataatgtaaagtgatcagatcaagataattagcatatttatcatctcaaacatttatttttttgtgtgttggacatgttcgatatcatccatctacctatttgaaactatatattattaactgtagtcatcccactgtgatacagaatactagaacttactccccttatctagctgtaattttgtatcctttaacaaatctttcctctatacctccctttcccctacctttccagcctctagtattctgttctttttacttctatgagatcaactttttttttagtgtctgcgtatgaatgagaacatgcagtgtgtaacttcctgttcctggcttatttcacttaacatgaagtcccccatttctgcccatgttgctacaaatgacaggatttcattcctttttatggttgaatagtatttcattgtgtatatgtacacattttctttatccattcatctgtttttggacacctaggttgatttcatatcttggctattgtgaatcgtgctgcaaaaaaacataggagtgcagatgtcttttcaacatactgattttatttcctttgcataaatgcccagtagtggcattgctgaatcatatggtagttctatttgtaatttcttgaggaacctccatattgttctctatattggctgtactagtttacattcccaccaacagtgtataaaatttcccttttctctgcattcttgccagcatttgttatttttatttttatttttttgtctttttgataatagcaatcctaactggggtgagatgatacctcattgtggttttgatttgcattttcatggtgattagtgatgtttagcatttttcatatatttgtcgtatgttttcttttgagaaatgtctattcagataatttgcccatttttaaatcggattgtgtgggatttttgctgttgagatgtttgagctacttgtatatgctggatagtaatcccttgtcagctgagtagtttgcaaatattttctcccattctgtagattgttttttcactctgttgattgttttttattttttttttctgtgcagaggctttttagtttgatataatcaagtttgtttctttttgcttcttttgcctgtgcttttgagaacttagtcataaaatattttctcaaaccaatgtcctacagtatttcctgtgttttcttctagtagttttatcatttggggtcttatatttgggtctctgattccttttcagctgatttttatgtagggtaagaagggaaagtctagtttcattcttcattcttttgcatatggatgtacaattttcccagcaccaattattgaaggaattctcctttccccaatgagcgttctttgcaccttcgtcaaaaatcagttggctgtagatatgtggattaaagtttgcattgtctattctgcttcattggtctatgtgtctgtttttatgccagtatcatgctgttttggctactataggtttgtagtatattttaagtctgatagtgtcaattttttgctttttgaaatgagtctattcccacatttgccagcaccttttattttatgcttatcatttttatgagaaaactgtggaaaaagctggctttaaatatctcactcagggctttaaaacagactaatttttagagtttagatgagaaattaaatgcaatttgtagaatggtaagaaattaacaccagcatcaaaaaaactacttcagctgatgatacagacaaaatgttagaaatgagtcaccttggactttaccacattcttttcttattatcaggatagaaaagtctcacaggccttacgaagtgatggggattgttttcctccttgacaatagaagcaatgaataaaaagttgaatttgaggagggggcttggcaaaaactactaaatttctcaaaaaattgattagacaaaaacagatgcttttagactttgctagcaaacctcagtttggattgataggaaacctgctagcaaaagttaggttcaatttacgataaaaataattggtaggtgtcaaacattgttgtctcacataacagttaaatgaaccctctgagtaaggtgacattattcgcattttgctgatgaggaaatcaaggcttagaaattgctttttatcactattactgataaattcagaggctgaacttgaagccatggctatcagactctaaggcaccctgcccctggcctttattctgttcgcagattattcaccagtcatataagattcatgcatttggagaaggcttttactttcatttttattactttattttctatatataaatgatttttatgtcatgtaatttttatctctccctcatcatcaccagtattgctcatttgttttatgtagtaaaactagctaaaaagtgctttttaaataatggtgcatgactgaagctttatgtttttaacttcaaatattacatggggatgttaaatattattgcaaaagcacaaagctattttgaatcaggtgcataaagctcataattgatattggcactgtgtatttacaatagtctagggaagcaacatttgtcaaaatcataaccttgaacaatgcattttgttttcttctagtaaccccttgaaatgtccagtttttaaaatcctggccacatatctgctacctggctggttaggggtgaaggagacaggacatgctgaaaggaacacagcttcagaggtcactgaatccccacactgttccctgctccctcccctcttctgcaaggacctgctgtccctctgttcagtggcttggccactgcaccccgattcaataacatgatgggtatatttacttagctctgtcaaccctcaaaatacatttgcctgtccttaagtaacaggaagataaccatattgatgtttaaaagtgctgcccgtaattaatttctttcctttgaagcatggccattgttaacgatccctgttttactatgcctcttcagctggagccattctttgccatctaaaaataaatggctttgttatgcacatttattccatctgcatttattccaactacagttaatatattaatactaggaatccaggcagattaagttcacccattcgtttgtcttcattattatagaattagtgatcctgatctcctcaattccagtctgattcgtttcaaaagatattgagtgtgcctcatctttgctgaattgcatctttgagggtgaccatgaatgcatttaaaatatgtgtttacactgctgactgggtcatggcctggccaatgcaagtgctggtcttgattttccagtcctgcccagtggctaaggtagcatgaattttctcttgctccaaagcatatgagtccagtttctggtcttttcctgagctctccatggaagagccttgtcttcagcggcaggctgtaatttgattttacataacatgtttcagtggattttctgtaggataagattcaaataattatatagccatccatttggcatctgatagacattatgttcttatctgctttctggtggattagttaggattctgttgtggcacaggaaaggagggtactcatgttcatttggcattctcagctttgacctgttttcctagacctccatttcagctttagtggaaactaaattattaatacgatctgcattgtgcctgtgcagagagctttatccagcctgttttttaaagtgctaccaggaatctctgaagtaataggaaaacagatttttggaggccctgtggaataagggaaagggcctgggcatgggctgtggaggcagaccggcttgggtttgaatcttgacacaattactactacttctctgtggagtgtgaagtcggttacttaagctctctgagcccctgtgccctcatccataataatgcctaccatgaagagacgctatgaaggctaaattaaattgaacatgaagtggccatcccaatgcagtgattcaacaaatgttaattcctcccacttccccactcctttcttcattcccttgtccacctggaagaaatgagggtttattttatgctaagcatatttagtgatagtcatcagtgaaaatgggcaaagtaaatttgctaaagtgaattacaagctgagggtaaataaataaggaaacgataaatacctgtatgtgtttatgttgggggaagtagggaatatgtattccagaaaggacagttaaaaccagagccaaatttctagtaggaagaaatgtggtttatggaggcattaaacgtggggcaggaggcttgggttctagcgaagtgtggtggtatttcccagatcaaccagtgcagctccagctgcttctgcaccagcaccccgacagtcagtgaaggtgcctcggcctgcttgggagattttctaaattgtgataaaccagtccttcccccctccccccccaggcaggccttaatgggttacctttgagttctcactaaaggcctcccactggcagtgctgcttgactcccagagcaaaaaccacttggaagaaattcatcagcagaagttcagttctagtgattctggtaagagtgctcatatgcagtttctcagggacaattagaagtaggcaaaccatgaattgttgggttttcttgctaaatattaactgtcaatgcaaagaagactgctttcagagcttttgacagtgtttaatacctgttgtgcccctagtactcgtgcttgattacttgtaatgtactagagcattctgtgtattctttggacttattttttctcacatctaaatagatgtccattgtagaaaccacattaaacctagagaggcaaagatcacccagagaaacatggctgttcccattttgaaatagattttttcaatgtttttctgtgcgtgtatatacgtcacttcttctttcctcccttctctttcttttgtttctcttcccttttttcctcttcccaaatgaagatgagataataatagtacctccttttttgtaacctcatttttccactaaaaatataatgtgaacataaaaatgaacatatgtccacttcaataaatatatttctttaaattttcaaaggatctatagcatattactttatgagtgtaccaaaagtaccaacgaatctcttatttttctatattcagtttattttcatttttgtttttatgaaaaatgccacaaaggacaacagcacttcatctttttcctaaacccacagtgttcttgttttctactctcctgggtttctggtgatttttgttttgttttgttttgtttttaacatgatattccaggtcctccatttttaagccagagctggtatttggaactcattttccaaaaatccactagctgaccttagttctggtgagaataactctacttttcaccatccccagagcataccctactttgtcactgtgggtctttgtgttggtctgcctgcaatcactccttctatctcatatatacaaatccttccaactgctggggctcatctcctgcctcaccctcttcctgaaatgctagtttatccagctggaaggaatttctttcatcttaactattattttacaactgtttgtatctctcaggaaaccaaagatactctacatggaagtatagtttttctgaagacatctgatgaaaagtcacaggtattgatttggaatgttggcaaggcccctaaggttgcccgccggatcccctttccttgtctgttttatctcgaggaccctgacactggtcctgagagtccttcccagctccagtagtatcccttgtgctcctactgcaggacacagtaggagcacaagggatacttggagcacaaggcatacaaggagcacttgggcaggactacaaatcacagtgtgtcctcttctagctcccttgacactgtcctgtagaatgaagaaatgatagtgggtacacagctctctgcccagggctctgtacttttcctccagccttcattaactcatctgcaattcttttaggccagtgactctcaactgatgagagaagaggcttcatcaggttcatctggggttagcgtaagcacctggcctggtttgcccaggactgaaaggtttcccaggattccactttcagtgctagaacaaggacggctatatccctcactccaagagcatattagaattcatggagtgtggtggggcaaattgtaaagcaagggagagatcctccatgccacctgtctctaaaaccatctcagccttgcttgccttccgtgaccttgccttccatctgtgactatgagatcactttttttcctctaggagtccatttcccattttgtaatttccagtgtcatcaataggctttattcctacctaaatttcctaccatctcctgactgtttaagtacagtgacatcttccccatgtcatgtcatggtgaatcgattatatgaaagtatataaaattcagctttgggcacaccaactcctgctttcattatttagggtctcacccaggacccaattcttgccttgtttttatctctcttcaactcccaggatcttgtttcttattcatttgcattcttattttgattatttccaactttgactttcccctgcctatactgccttagccaagggacggacatttaaatcttctccccacacaagaggcccctggcctggccaccttctacccgatgagatattggacataaatagacataaagaacattactactttctaatttaattctagtttcattttttcctgtcccagtcagagaaagcccaccattgttttattagaaaatgatgggggatgctacaaagttatgtaactaaaatattgcatgtgcaagaggatcactttttactcaaattcatatgatggagatgacaaacatgatttcaaattgctttacaataaatactggttttaaaaaaatctactgatcatgcctctatttttataccaatcactcaaatcatatttaatgcatttttaatgactttataggctgcagatgaaaacacatgattcagtcacttcattagagtgagtaaatggatgatttcatttattttaagtgaaaagaaaagctactgtagacatctgaatttaaatctataggatttatataaatacatcggtttcgaagggcagagttgtatggaaaattcccaaagaggctctagagtcaaggaatcttagagatggaagggactgttgaggtcagtaagccggggcctctgcagagccagcctctccttgacaacagctctatgctttgtcagtctctgcttatgaattgcctgtgactggaaatgtcctatctctgaacatagcccccattgctgaacagttctgattgttagaacatgctctcttattttgagactaaacctagcaccctgtcatggccacccatatgccagctatttatatagataaagatagtgatatgttggtgctgctgcttctcttcaagttaaacgctccctgtttctttagctggtcttcataagacagagaatcgtgataccccttaaatcctctcttagccatcatgagataactagaattgacactatttcatgtgtggattgtctagatcataatatattgatgtagtacatccacagttgttgccacaattggtaaaaggggccaaagtcacagttgttttggggagaaggcagttgagagcccattcagaccattttcatgggaactttgtttctgtttcacataaatttttttcttcctctttaacttttagttttatctcttggttggctttgaaatatatgaatttaactgatttgtggatatactgcaacatttataaacagcggtaaagtgtagaattataaagatgtgaaagctttttccctctaatattctatcgtctgtgttttccattgtagtatttcccattaccttatgcctcacacttagaaattatattctaaatattgattaaggaacaaccctatggtctacattgctttctcttttttctacttccacttggcttccacccttctatttatgtttctgctttcttttctcaccttcttcatcggagaagttttcactaaaattcactagaacagatggaaatattttaatatcagtttggataccagaaaggaacaagttatgtaatgtgttaaaatttatgaaaggctgattttcatatagttcagaataacaaatttaataaacagttggcttcttagggactgaatccttagatactagcaagtatgtagaattatcttgactggagaattaccccataagaaggacataaaaagaacaaaattctgaaacatttgagtatttgttgtagtgcagtgaatatgaaacatacatgttttgattcaacaatatttcaacattttggttcaaatatttttatgctccaggggtacaaaaaaataaaacatgcttccagtcccttgggaactggcagcctattaagagagacagacaactttaaaataattaaaatagtcttacagttgatatagaaaatgtataaggtgcagcctcaccaacatctgatattttttgacttgttaacaatagccattctgactgtataaggtggacctcattgtggttttgatttgcagttttctggtgattagtgatgtggagcgttttttcatatgtttgttggccactcgtatgtcttcttttggagatcttatgaaggggcacatctaccagggcagagggtagagatgagacagatgtgtagattgaaggagtcttgaaaactgagaagtgtggcagatattgtagggagcacagatagaaatgctttgaaaattaatgggacatgatgacttactgaatgtggttggaagagaaaggaaggatcccgaaagaacctgtcagtgatgtcatgtgtgagtgtctgtaaccaatatgtggtgataccttgtattgagaatggaatgcacagggattggtttccacttatttaggttatgccccctcctttcctcccgatttcccctattactttcaactattaacagtatgtttgcaaagtaagaaatgttatctcaggttgatgtttagcttgagttttcagagctagctcacaaatgctgaagttctagatttggaacatccgagaacacggaaatctaccaagctgatgaattagaaacctggagaataattactgaataattttgagaagtgttgaagccactgatttttgtctaagctgtcattcactgggcatgataaatgttagaaatactaattaaaagccttctcagatctagactatggcaatctttgtgataagaactgtgatgttataattgtgttctcccatttactgcgctgtaagtatttgttggattcatgatagggccttcaaaacagtgtcatgttttaatgcattcttctactttgagagcaatatttgaatagtgatttttatatattttttctttttaaattaatttttcaatgctattcatagcgatttttaaaaaatggaaaattagaagaaaatcatccacagtaagctctgcatgattaatataatccatttctttttcacatgctgtaatagcattaaaagtttaattttcagaagtttagagaaatgaaaaaggaagcatcttgaaaaacaattttacatgagaatagtttttcctttcaaatctttttgttaacaaaaataggcacgattacacttagatgtaagaatgcttggaaaagttgccaagctaagtctaaacaacatggactaggtttcacttgtctgaaatgtgctacctttattgaaagattgtttaaagtttgaagctacattttaaagatttttgcaagaacattaaaatgcacttggctgatctttttataaaatacctctgaagaagtgtacataatattttaatgaaaaatgtcaccttaatattaaaatctcaaattaccagtaaagaatgccgttaccccaaaatccatgagactaattttctaactcttcttgtagtttgtgttaatgtgtgtttgtaaatctctctgtatgtttaatttcattaacctgacattgtatatcagtataggcagttaatagttctagcagaaataaataaacagatatctaacgtgataagagtttatcttagataagagtcgaagtagacaaacatgagagagaacagttcacagttcattttgttttaagatgaaacaggtatctactgctcaaatagttatgttaaacaggaagttccctggatggaatgattgtgagatatacaatgacatttaccaatgtaaagaaatctttttataataagaataattgtgtcttgttgtatctgtgtttgaggtcacatattcaattatcataaaatgaggcatacatatattctaaggcaagaggccttcttagactcagccttttgtgctgtagaccacagctgggtcattgacttcagataggactaggaagtcccatagtccctcttgtcagaatggggaatataacaggaatgaatagcccagaacgttagcttgaacttgcaatttaataatgttgagcttctagttgcattctcggcaatgtttactttcatctcataacaataaactgtttatggtaatgtcctagtaaagtgtggcactgaatctgagacatgtggcacaaggaatccttcagctttcgtgtaaatgtgcagccaaagatgttcattttatttgcttatttgctttacaattatatgtccagaaaattctgaaaggaactctgtgcttagatcttgttagtttttactgtttctagggagtttttttttaaaccgaagtataatttagatacagtcaaatgcactgatcctaagggtatagttaatcagctttgacaaatgcacacagtcatttaacctattccttccacaagatgtagaacctttcatcagccctgaaagttcctttattcccttctatagtcagtatccccctgctacttgaagcagtcagcgttaggatttccagcaccaggttggatcttaatgttaattcttagaggttatatgtcagactgacatgtcaaaaaggattttcaaaactatgttttatctgaggagtttttttctccatagagaattattcagaagtacgtgaatggggatttaaaactcagccatgcagatttccattctattgcttctaaaacacatgacagcattctgtgtctaattgttattaaaggaggagcaggtcagtttccagcctgtcaaaaatatttcaagtaattttctttcttgttttcatttggctctattttaatttccacttatgctaaaaaattgctgccaatccatcatgattataccttaactttgtgtggtgtatactccctttgtgtagggcgtagatgatcaatacatgtaaagttagtaagaacaatcaataaacatcatgaataaagccaaacagctcagtacaccccccgcactgagtttggagaagcaatgtttgccttggtatctatcagcctctgtggggtgataggagatcaagtcaaatactccccacatacgtaccttctccatgactatgtgccgttgcatgaaatgtgaagctccgtcatttggatctcatggtagccagacaatacttttgttctttttcttggaaagtgtgtgtgtgtgtgtgtgtgtacatgcactagtgtatagcatcatgtattgcccctagagattttctcttcccttcttttagttaatgtgctcttcttgataaataaatttcagaggcaaggttgtaataaactgaacaatgcagtgagatacacaattctaggatacagggctacttgtatttcattattgcaacacgtggagtatacaatgaaattgcactgctgttgtaatttattctctttattaaaatagacaagcattagacaagccataaaatttccatctgcattcacagcaggctcccaccatctgaaatacagattttcccccttctcttgaaaacacccaggactgaaacattttaatattggggatcaagagaattataatatttaatttctgaaagcgatggttatcctcatcagtgctttcaactgctgcatccattttaaagagaaagctcgccttttatacttaaatgtcactgaggacacaggagttgggtcagaaagatctgcagtgcagcagggggaaatgaatgggttcccagcttggtaattctgctgtagttctgcttctatcaccctaccagcctaatcaccttcagaaggaaaacaaaaggcatttttgcagtgtgctgatgatcaccccagaggcaaggcaacgattgttgttttagcacatttttccccactgcctgaaggagaaaagcttttaataatgggaaattgccaaccaaggcatgtaaaagtgaaagcctccttctctggctagaggaagaattcatttctttctttctctaatttcaaagccaaacatttgcttgacattttaggcatagaaagcatagagtcctataaagatagttaagaaggtaattgtaaattctaatcctctttttagcaaactgttcccccacttggagaatattctgtttcaatttttcataaaggcagtctgatgaaaaatttaaacaaactcttttaggagcaagtcttccgtcagatgtcacgccaagctcccatttggtaggaacggttatgtaaggcagtctgtgccatctatctcagtaatagacatctaacaggaatccagggtccaggaaactctaatgcttgtctctccctgaagacttcatgtttgtggtatttctgcctctgttaacttaagtgtaacagaaaattttaacaaggttaatctctttagaacgatgttgggaaaggaggatatatattctctccttggagagtaaaataaaatgttcacgcagtactataattaggtaaatatagtaagaataaaaatgataatagagcacgttttttcattggataaagggatgggatacagtgctttgagaaggacctccaaggacactgaaggggaaaccgaaaaaataagagttctgaagtcttaagcggtacatattgatttattatttacaaaggactttcatgtacattatcacatttgatccttgtaactctgtgaaaaaggatagtgtcattttcacagaagttatactacttgctcaaggtcagttggctaccaagttactctgaatcctgagtgatttcctccctgcctcccctctttcctccttcccttcctccccaagccccctcacttcctgcctctcttcttcccccttctttcttccttcaatgtattaaacaggaaaagtctagtatctcctcttattctgctagaataaccatttcaggcacatatccatggtgaaagcaggaaagaaaggtctaagcctaaccagattgtatcacagagacctggaggaggtgctgaaagtgcctcctttcctggcagggtcattatcactaaggtaaaaacagagaaagagcagttgggctttaacaaagaatttgtaagtacagtggtttaatttttttgtttttttcgagacagagtctgtctctgtcactcaggctggagtacagtggcatgatctcagctctctgcaaactccgcctcccgggttcaagctatcctcttgccttggcctcccaagtagcttgggagtgcgtgccaccaagcctggctaatttttgtatttttagtagagacgggatttcaccatgttgaccaggctggtctcgaacttctgacctcaagtgatgatccatttgccttggcctcccaaactgctgggattacaggtgtgagccaccatgcctggcctaatattttagtcctaaaacacaggtattttgcccttaacaggtgagagactaaggtttggtacaacttacagagattaaatgtgtgtgaagttgtttcaacagctgtatgtatatggtaatttattgtcatattattattactgttaccactctcactgctgctgacacaatcatagtttatcttggtggttaggagtcagtcagctctggagtaggattcctggatttcctgtgtttaagtctcacctctgttgcttactaacagtgtggccttgggcttgttaattaacctcagtcaatttcctcatgtataagatagagacaacaataatccgtctctcaaggggatcattggaaaaatttcctgaaatggtcaacgtaaattgttttagaagtgctaaataagtccctgatgtttttctctcgttccatttaaagagtatacttctgattaaatcttggttgagacttttaaagtttctcaatacttgtcaacagcaggtatttcttaaacactagacaaccaagagagaaatgcttctaataactgttaaatgcttataatgtcatgcaatatcatataattcaattttcccttttaagagcagattgattgccctttattgttttagagatttattttacaacaaacatgaaaactgctcaaggaaaatggtgataggtgttatcagatttggattaatagaatttaaagtggaatttgggagtaatcttcaaagcatggggatctataacttcataagaaagtattttttatagtttttgatttcttgaatatcatttagcaacttatgtatcttttacattgaatgatatctctgtaacagaaaaggctaaaagatctttataaagaatatcttgctaatataagaagtttttcatttccctcatctcattttctattctttccttttttcaataaatattttagcatctattttttaggcaccatacaagatgagggaaaatggcaaataatagccaaagccttgacttggaatttaaagtctgtgtttttcattccttgaaatgtattacacaaatatttcacatttaagtgtgtggtaatttgggggtatttgttctcaaaaaaaaatccacaaaaggtggatgttgtctttaccctttggaaatatagaaaatgtctctgaatttatgtttccttttttttttgttatttgtttaaaacatacagttcttccccatttacttacagttttgtaaattgtccacattaaaaattgttaccttattttctcattacattaggaaacagtttactagtaggctctatggctatattgtcttatttttctaacaaattacgtccattttttaattatactttaagttctggggtacatgtgcagaatgtgcaggtttgttacttaggtatacacgtaccatggagtttgatgcacccatcaatccaccatctacattaggtatttctcctaatgctatcccacccgtagcctcccaccccccaacaggccccagtgtgtgatgttcccctccctgggtccatgtgttctcattgttcaactcccacttatgagtgagaacatgcggtgtttggttttctgtttctgtgttagtttgttgagaatgatggtttatcattctcagcaaactaatatatccattgttattattaactcttctcttgagatacctctttacatcatttctagatcacttgagcagccttaatcattttctctttttttttttttgagaccgagtcttgctctgtcacccaggctggagtgcaatggtgtgatcttggctcactgcaacctctgcctccgaggttcaagcaattctcctgcctcagcctcccaagtagctgggattaaaggcacccaccaccatgcccggctaatttttgtatttttagtagaaacagggcttcaccatgttggccaggctggtcaggaactcctgaccttcagtgatctgcccgcctcagcctccgaaagtgctgggattacaggcttgagccactgagcccggcctgttttctcttaaagttaaaaaaaaaaaaaaaaaaaaaaaacacttctccttcctcttttttaactacagtgggctggtaacacctttgttgttagcttaaaaataaattaatcctatctttttataaaaacttacgatgtttttctataagaaaagggatttagaaaggacattatatgcatatgttccattttcctggttgtactgcctttttcattctcatttttgatatgtacatcatatttactcttttgttctgtgattcatgttaaggttgttttgttttggtacttttgacattggtgtgacttaaggaaattgtaatgttttgaatttcttattgggctgtgcccttataatttctaatgaaaacatactcatatgccctttggggccatcacagtcggagaagtgttgccctgtacacttagccacgcgccccaacctagaaagggtcgtgtgttgagaacctcagatagttgtttaagttgcacattctcaattctatggaatcttccctattttgccctatctgggccctttattctcctctaattttcttgcctctatccagatacaagtggttggaggagtgatatatttgttaggaatgtctttagctacaaatagcagtgcgtctgactaacagtgaggtaaacaaagaggggtttctttttcccccacaaaacaagcaatctgaaggtagacagctgctggtgctatttcggtttagtgatgttggccttcgctcccttcgttccatgctgcaaatctgcattcaagatggaaagaagtgaacgacagggccagctattcagtgcctttatcaaaaaaagcagatgccttcccagaagtcacaaccaacctgggtttatatcccgctggccagaactgcatgttgtattgcgccccccgcccccctcccccgcccgcccgccgcaaccccagctgcaagggagactggaaaagtaagtagttggcatttctgctggaaagggtagcaaaagaaaacggcttgggaatatccaatggatgaacagagaacaagtcatctatgtccaggatagcccaccctatctactctccaggaccagctctaatgtccccgggtaaagcctttcccaaattcctcagacagagtttttctctgtgaatccacctggttctgcggtcatcatcaactagactgagtgtgctctctgggcgagggctccatcaccgcccatggtacctgagagatggtgctcagtgaaggtttgctaagaaatgaatcaatgtgtggggatcctctcagtgttacctgaagccagctgctggaggtatgcagagtgctgaatgaggaactctcctttccacctgacattccatccttgtccctggacattccctgatgaaatgcaaaaccacagccctgaccactcaatcgtattcattaagatcctatggggagcttttggccaaacccctgcaggctcacgtgcgatagaagtattctcatttgggacagtaagctttctgccttcctaaaattcttacacagttttaaatagtgatagccatttagtctcttgatgatataaatcttagctcagcataacaatcagtgcggttttctgaaacgagaaaatgtacaaaatatctattcataggaattattcttggttatgtctgaataggcatataattcaaaatatagtttatacttcctggaatttacccaaataagatagttaaacaagtgtgcaaagatatatgtacaaagttgttttttgtttttttctagcagtgttttttaatgaaatttggaaacattccagctcttcactatggagttaggttaaatggataatggaacactattgaatcattaaaagtgaccacataggacatcctgagagtatagatatgttgtggggcatatcaagtaggctgtgtgtatgtgagaagtaaccttctctgcttacaaagctgaaattatgcatatataggggtggctgttcaccaaaatgttaaataatgattatctcttcatggtaacatttttcaaccttaaagttttttgtattgttttatttttgaaaccgtgtgtatgtgttttccaataagaaaaagcagttttcacaaaacataattttcccaaaaaatgctttaggttaatgaaaaaaaaagtctgaagaactatgtacaaaacttcaacttacttgacccaaattaacaataaaactggattaacgacctttctcttctaattcacaagaatggaaaatcaggacaaaaagtgaactataactaggaatatattgtaaataataatcctcagaatatttcttggactacatctcttccacttcccccataccttgttccactacaatgaatgatatccctgactacaaactcctgccagttcctttcttactgaataaagtgactgaactatatgaaatacaagtggaataatacattgatgaaatattttcaacatcaagatctaaacaaaaggtattttctgaaaagtcttgagttaaaccgaaaattaaattcacaattctattccctaaacattccaattaataaagcattcaccatagaaactttgaagaagtggttttaaaactctcactttgaaattctagtgtatcaaaggactattactgttaaccacaaatacaggtgaaaactcccgagagcagttcactcatactattgtattgccctgctttttggtaagtagaataattgttagtagcaaaattccgataactcaagtggaaaatatattcgaaaggtaaaggtacacattaattctgtggaatactgaacagcttccttagtcgagaaagaaaagaaaaccccagaagaaagatttcaaaaaatagaattgatccaatgtcttgattctggaatatgtccagtatctctcatcttcttgttgataaaaacctgcatgagttttcagactagtaaagatttttacattgtattaattcagaaaatctatctggtctattgtttttaataataatttaagcaggtgtggcatttttcattttcaccaatctttcttagaaaaaaattgataatctttctgtgtaaatcttcctttttctttcatgggtagatcataggtagaaatcaagaaatataattgtttctctatttaaataagggttttacacgattagatttaaaggttaaatgtgattttttattcaaaaaaaaatctttaagcttcaataaatccagctcctgtctcccgggatatcctgtcactagaaggaaaagagagtattttagacagtacttttttttttgacactggtctcactgtcacccaggctggagtacagtggcgtgaactgcagcctcaacctcctgggtttaagcaatcctcccatctcagccttcccagtagctggaactacaggtgcataccactatgcccagctaactttttaatcttttgtagagacagggtcttactatgttatccaggctggtctcaaactcccgggctcaggcagtcatcttgcctcagcctctcaaagtgctgggactacaggcatgagccaacgctccaggccctagatagtactctttatttttctcttcacatagtaagaaatatttcataccaactttattaaaaacaaaatgaaatagatgtcccactgtaagtttcttgaccttttagctgagcactcttattcttttagctccctggaataaaagaattgtttctgataaaagtagatcctcacttaattccttcagattttggtcaaaacaggcaaataaagtaagcctaaaagcgcagttgtctctcactctgccaggcacacatataggcacgcatgtacacacagagtaccagatgcaacaagatttgaaactgtggttaagaagctctataactatcaaaactattttatggatcctaaaaacactagatattttagatatcttttaggaatcagttaatgtactattttattatactagttcagaagtttggagagtactgatgccaaatagaaattttagaaacgaatagtagagttgtgcttaatcctttaagtttggtctaatttgattacttagtataatggttaagaatttttatattttagatagtatggctgaactcttcattcaaattggcatgtgacttaaaagagctttgactgattgataatcctttgattagttttagagacaggggctttctctgtcacccagtctagaatgcagtagcatgatcatggctcattgccttgaactcctgtgctcaagcgatcctcctgcctcagcttcccaaagtcctgggattacaggcatgagccaccacaactggcccaaatagctttgtttttaaagggatttttaaaagaccaattagtaaggatttagatcaaattactctaaggaaatcataaatcacaccaataaaatataatctgaacttaagaatacatgtgacaaatgcttaaaagaacctcaaactgactggtatatgatagggtgctttagtaaataatagtagttaatttatgtgtgaattggaaagatgttattagctctttgccaaagttgggcttggtatatatttgtagagagaaattgatccaagggagccactctgactaacacttccaaccaaggtgtgaggcatatgctttagctggagaggagtgctattgaggccactgacatcacagggtctcaatcaaattgggagagtgagggcagcaggtgcttataaaagaggagagccagatgtctttatgaaccactgttatttctcattaccatgtatgtagacatggcatgcaagcagacatcaggcattccttgagcacctccctagtgtcagacactgttttacacaccagggttacagtagtgaataagacagcatgagaccctgcaagaatagggcttatagctagtggagatagtcaaacaatcaacatgtgaacaataagccaataagataactgcaggtccaaataaatgtgtgaagaaggtacactcggctaaggtgggtaggtagtaactagaaagagttgctttatttatttagggtggttaggatagacctctcagaagagatgacatttgagttataatctgaattactaaaataaaaaatcttttccaaaaaaaaaaggtttatcaaacagaaggaacaacaagtgcaaagaccctgtggattgatctaagctggtgtgtgttaggctcagaaaggtggccagtgttctagaagtaaagtgaacagaaagaatggcagcaggtgaagttaaatttgaccttgatgggtctgttctgcagccagctgtagctacatcagcaagtcagtcagatatacaagtagggatgtcaatcaggagcctaaatctgagacatgagacagccatctgtgagtgtattgaattttaaaccaatggaactcagtgagagggaaactaaagaatagaggatgactgagcacagagcaccccatcatttagagatctagaaaaggaagagaaaccaaatgagaggctgagaagtaaaacacagtgaggcaggggaaagaccaggtaagcctgcatgattgtctagggaggaaagtgatttgtgaaggagggtgtggccaaccaacagtgtctgatacaagggaggtgctcaaggaatacctgacatatgattgcatgccctatctacataatggctttgtaagatgtaggttactggcagtcttgctaggtgggttaaagagaggagcaagataaagaagtaaaacaatatattggagcattttatggtgaaatgcagcagataaatgacatagtagctggaaaagtgggataagagagaagttttgggtgtgtgtgtgtgtgtgtgtgtttgtgtgtgtgtgtgtgtgtgtatacatatgcatgttttaagtatgagaaggataggaaaagcatctccttgatgggaagatgactgtagagatggagaaattgacaatgtaaaagggacaggagataatggcaaaagctgagtttttgagagggcaagagaagcccagaatgatgtgaggaagttagcacccacattcaagggttggccttagagaaaggcagggatgcttctgccattgcagaaggagagagagtagggtgcctggaacagattcagaaggttggcagagtggcagtcagagatgaagtagtactcatcacatcgtatccattttctctatgaagtatgagggatggctggaagtgaaaaatgaagagggtttaaagaatggagaaagattaggtatgaaataattttcttatttggctgaaaaagcaaatttgctaagtaagtttataagaccttctggcactgttgagggtccattcaagattcatagtaacaaatttgaagtatgcccagtcagcaaagtcaggtggttttctctgggattattcaactgtgcaactcgatttccttatacatattgaaggtatggctgaaatgctgagagcaaagcatataaaggaagtgattacagaggaggtcatagaatataagctgataaggaggaaactgaagataagagggaggtgatcgatagtggaagataagagggaggtgatggataggcggagtctggatatgaaggtctgtatggaatggaataccagaacaagtgagccaagagacacaagggaatggttaactggaaatacccacaatagttactttggaggtgacgcagctgttggtgattaaatttagcatgtgcccacaccagtgtatggctgaagtggattggagaaagagccttggagtgaaggaggtcaaggatgtaagaggccagagcctcagaaacatcactacctgaatgttgaagctgcaaagaaagccaggatcaatagtggagtaaaaacgatgggccatggaatgtaatcaccagtgaccaagggcagtgatgaggataggaatagtagggtgatcagaaaacatagtaattgtctggtgggccaggcacggtggctcacgccggtaatcccagaattttaggaggccaaggcgggtggatcacttgaggacaggagttcaagaccagcctggccaacatggcaaaaccccatctctactaaaaatacaaaaattagccaggcgtggtggtgcatacatgtaatctcagctactggggaggctgaggcacaagaatcgcctaaacccaggaggcagaggttacactgagctgagtttgcaccactgcactccagcctgggtcacacagtgagactccatctcaaggaaatgaaaaagaaagcatagtaagtgtctgggaaacatggacttttgatagtgatcaaggggaccttggatattaggtgaggtgagactgctcctggaaatctctccgggaggatggttggcaatccaatagagtccaaagcatttagctggggccaatgtgcaagtgttctaacctccagctactgcacagttggatagacagggatttttttctctgagggagcttcatgagctaggagtccccaagggaggaattggaatggtcattctcctcaagccagtagatgccacaccttctggggacatagagcaagtggaaacctctgagcatacaatctttccagagtcagtagggttattactgactgtatatgtagactgaatccagtatatagatacatgcacagaggcagttctcagctcccagatgactttagaaatctatgtatgtgaactcagaactcaaatttcctgtgaaaattgtgtttaacaacagagggtgtcattctcagggaagtgtgtgaagacatttcacatgcaggatggctaaaccagaggtctaaggagactacagtgctcaccatgcctcagattatttctactggaaacgtgcattctacttactgctacttccctgggctctcacataagcagcccggcacatattttgttcgttcttgtgaacttcttatgtgtgtgttgctgttactagactgttaagatctttgaatcctaccacgatgcccacattaaattgccctgaaaaacactccgaaataactggcttctgtttctgccctgtcctttttggcagggcaagaaaggaatcttgagaagacaggaaggataaatgaaggaaggaagaaaatccttactggcctcatttttccacttgtgtctgaaatgtagaactttgtttaaagttgtgaggtggcaaaatacgactgactaattgtaggcacattaagaaaaggagcctggagggagatgttggggaaggtttgaagtgcaccttataatcgacaaacaaaggaatattgcactatgaccgtggaggtgagcgagcacttcatggtcttttgtgagtaggttagaagggggagcctttggttgttcagccagcttgtctttttcctcaatgagagcaatgttttccaaactatttttggcttcagatacctcatagtgactaaaagtgataaagccatatggaagaactttgcccaatctcctagctctgtccaacaaggtcatgggcaatgacaatccaataaaaactagtggtgccactaaaggatcccgagggaacaggctattcaagacagtggcacaaaagctaaacttaggtttaaaaaaaaaatgatcactgattttcctcccttttaggtctttgagaaggaagtaaaggtgttgactttttgataaggttttgtttttgtttcaattaaactttttggagaataccattgtttttcatttgttggtttgtaaatcttgaaaattatgagaaatgtagattattgaaagaaaaaattagcaatacagattataaaaagaagaaaatagcaatcatgaatagcctcaatacccgggattaaacattgttaacaatgtagcatatttccttctagtcttttttcttatgtactatttcttaagtggctaaattatatactataaatagtcttgataaaataaatttgtaagctgtccttagattaagcaaggaaacaaaatcttttagttgtaaagttaactatggagatgatcagactcagggtatttatttagcagaaataccaaatgtggaattctctggaaaattcaaaaccatcaatatcaaaaaatacaaaagaaaatttttcttatatttaaaaattcataagcataagataaacgtgtattataataacattccactttttatacaactgcattgtaggggggtagttcttctaaaataggataaaaacaaggaattaacattaaacacaacttgcatcttatcttccctctccttatcagtaagcaagagccaggaagaactggggcaagagctatttttatgttatatgttctttatttctgggatttgcaagtgaaatggcagcaaacggtttcctaactgctgttcttaactctggtttatttggaaagtgttattaaaaaacaacactggtttggttatttttcattaaggacttactagacaatatcaaattcagtattctattgagtttgaagatagtatctgtctttttttgtggtaatgaaagcagtttactactgaagacagcgtttcaagcaggtgaagatgtaatccatcttgtgtctttaaagacagctataattcctggagaaccattcagttatcaaaaggcataaagcactcagacttaaaggtttctcagatcttctctcacatttcttgtggcagatgtgccatgcatcttgggaagcactcagacttaaaggtttctcagatcttctctcacatttcttgtggcagatgtgccatgcatcttgggggaagggaagaatcgcctaaactctaaggcttgattttcacaattctgaaacaattcacaattcacaaagtactcagtggtcaagtctagctgattgtattggagaaggtgggatggaactgaaaactgggctatttattcaactttgatagatagtatacaatgctgtgcaggaggcaacacggcctccatgacatcatggactgcacgtggatatggagatgcgcaagccaagcacagccatttcgtgcctggtcacaggctgagctgataacaatgcacgtagctctgctggccctgcctgctgacaactactggggaaaattaacaggctgggatctccctggggaatcctaagagaattgagtcaaaggttagtggggtgaaacagtaggtttctgaggcaatgtttattttagaattggtcttcattctaaaaactgcccgtgtgatctttgtattcctttagtggttactgaatgttcctggtttcccctttccccagaacaagcaacagcacatgcagggaatagaatgagagatggcgcctgttatcttctgcctcggctgttcagctggggcagtgggccaaaggtcttaactacatctagcatcttcaaaacagagttccctcacaggagagtaggctcagtttctgttaatgagcaaaattaatgacaaaaggaagattgtgtggcaggaaatcctataggcagtaaatagtatgagaatctaaagacctgtgttaggcaggggtaaccaaggaaagtttgacacaggggcttataattaaaataagtaatgaaaagatattctattcatggcttattacagtgcatattacaagagttatggtgaactcatggactaaagaaatactagatttaagattcacagttcctccaggcaccgtggctcatgcctgtaatcccagcattttgggaggctgaggcaggtggatcgcttgagctcaggggtttgagaccagcctgcgcaacatagtgaaacccagtctctaaaaaaaaaaaaaaaaacaaaacaaaaattagccaggtgtgatggtgcacctttagccccagctatttgtggtccgaggtgggaggatggcctgagctggggaggtggagaatgcagtgagccgagatcacgcctctgcactccagccggggtgacagagtgagaccctgtctcaacaaaagaaaaagacaaaaaattcacacctcctatttttcatttgtttcttcatattctctctctttctccatccctttttgcctcttttttccctccctctcctaagagagtctagttccatttactcacgctaaatacaagtataatttaactgtactgtgcacatatacatagcacaacatagaacttaccatccttgagtcttcaaattttagtttctaagtagaaatagaaaagtaaatggctcaacacttacatcttctacttgctaagaactttaccctctgttcttttgggaatgaaagtaaggagaggagaaacatgtgttggaagagttgaaagagagtccaaggatggtgtagagttattctgaagaacatcataggaagttctcacctgtgctctcaggggccatgataataccaatgtatgccaaacaccatagtttccttggatctggtatcatacttccacagctaccaattaacttgaacttctaagtgctgcagtaactgaaattagattatacatctgtctaaatgagagctcttactttagccagtcccatagcgtgttcaggactagcatctgtgtttatgtgcatgagtgaatgaagtccaaaggcaaaccttcagcaaggactttattatcacaagtgagaaagagtttctgttttgtttttcaatttgctatttatttgagacggagtcttgctgtgtcacccaggctggatggagtacagtggcgtgatcacagctcactgcacccctccgcctcctgggctcaagcaattctcatgcctcagactcctgagtagctggacttgcaagcacctcaccatgcctgactaatttttggtatttttagaagagacacggtttcaccatgtttgccagactggtctcgaactcccaacttcaggtgtctgcctgtgtcagcctcctgaagagctgggattatcagcatgagccactgcgtgctggccttgctatttattttaatacagaattcaaatgaacatgagaataaatttccattgtgcacttatacttttatagtggtattttttttttcattctaaatgcatttcttggtctttttaatgcattgttatctgaggtacttgttttataatccttattagaaagaaattttaaaagtaacagggaggtgtacctttacattctgggttcttgctgaactgttctctgagaccccgatggcctaagcagtgatcctctgcccatctgtggctgcccagtccccattaaattccctgtgacttgtcttgattgtttcagagtctgaattgtaggtagctgcacttctacctgagcctgtcatacagtttcccaataaagttcaaaatagaacttaacacctttacatggtccggtagtttgtgttttaataaaagaagctggactaaaaaatgcaaatgagtagtcttttatttttcttcttcaaataaggaacttccccaatgctcctgccctgggatggagcagtctgtgatagcactgaagtgaataattctagacttggcagttctatgtcaaagcaagtctcataaacacagcagatgtacgttctgggtgactgccattagcgtgcatctgaggggttattgactggttatgggcagatttgggggtagaagatagtgaaggaaggggaaccaggactttaccccttgttgttttattttctgagtgattgcccccaaagaaaaactttcccagtctgaatctctaaatagatcttctctatttaaatgcttgtggtcctattaactattgggagcaaaactttctcagtctgaatctctaaatggatcttttctatttaaatgtttgtggtcatagtaactattggaagcactgaattggaagattttcactgaacagaaagaagtaagcctggcctttgtcattgtttaaattccaattgtttctttaaaaaaatgaggaaatatatgccccctgaatggtattgtctggttttataaaagtcggcttaggagatttttttttttctctatgaaaccaataaagcagttttaagtaattggagctaaattattcttcctggaacacagccaggtcagtggccctgggaagtatcaaagggcacagggaactctatggtgggcagcagcagcatcattacctttgtccacctggtgagccaggggctgctgagaccctgtggaacccagctcacctttcctgggatccttttcctttttgatggctgacctaaaaaactgctcacactgtggtatttcccctctgcctgtaccagcaaccttcagttgcttttatcttggcaacagctacatttgtagatctccacagctgctgcttttcctttagcgattagagctgaggtttaagagaatctcttggttagatttttgagtctctttcctggggaaataggattgagaggattggcctgaacaggctaagggactggcttcattacatgagacaaacttggaatagcttctgtaaattacttcttatctgtcctgtctgcccacatttgtaacatcacaagagttagaagaccccatattgcttgagcttttcgtgacctgaagtttttcaaccacatttatttaaaccatagctctttcctctgtttgtttaagctgtctcattcctaattcattccctcccccatatcccctccactgctgtatacaactggtctccttaaagccaaaacctttagctaccattttgctcgataattagctagcctacatttattggctgttgactatgtattctactatgcatattatagatatctacatacattgaatacattgtcttatctcccctcctagagtgtaaatttcttaaaatcaaggacaaagcattatctgcctttgcctctccttcgtgtagtgccttgcacttagtaagtgctgaataaatgaggccatcactgtgattatcactcgacttgaaatatataggaaatggatatgttagctattaggtgtgtattctcaccattgtatcctattccattcatttccaggaaaatgcttattaactagacaagtccgttactttatggtctttccctgctattttcttgtcttactgttccctctaagtctccactcacttctaaaaattatgacttgtccagagacccatgttgctctgaagtttcttattcttccatgaatatttgtgcctattagaagggagaacagagggtgggagtctctatttctaccctcatttcaacttttgttccaatgattgctactatttatatatcctctcctctgtttctttgtgcttagaaagaattagggttcatgtggctttttgcagataaatagagttattcgtagccaaagaatttgagttattttgagtctctctttatgaggagcaatgattacaagtcaagggtaaggattaagattttcatacattttggagtttttcatgtttaaaaaaaaatgtggttctagatgcactgaatatttcatggatttgtttactaagcagttatcttccttagcatcaaccgattatccttaactaatctttgcttactattttcatgagagctaaaattcctatttgcttcagttttgaatttcctgccagagctataacacatgaggtttttgtactctttctctagtagttgatgaaatccagaattcaagctgtctacgtagacatcttgcagaaaaagatctttttctgatttctctggttgaattcatgggatcacaagttgaatgaaaggttaagttcaagtagcaaatgaaaagcaaaatgcaacactaaacagtttgcagcaaaaatgttctgcatttttctccttcaagcagctgttgctcaactaagttgtggcggtactgatgctcttccctctctgtgtttctcatgagcccatcttgttaccacttactcacccttggagcagggcttcttcaagtacagttcatgctggggaggctgaaatggcagtagagagcttataaatatgtatgagagatgtacacattgctttagcatcccttctgtcttttgatgttatagtctaagatattttagcagataatggatatacccctttcattcaatgtacaattatggagaccttatcatgcgcatatcatttactgtaccagacaatgtggtcctatatggtctggatgagactactataaattgatttcttgtgtggcttatgaaatcacattttcttttaaaggtacccttctataaaatagaaatataatgtatcatgagtgtaaaaaccaccactaccacaccaccactactgctgttagccgctaccaaatacaagggctttactctatgccagacactataatgaatctttcaaccctctgaagtgggtaatgtatttgtatttagcagctgggaagcctgaggctaatagaagttaaattacttgttttgagttaaatatctaatttgtttcagagctgaagttcaaacccaagtcgatcttaccctaagtctgtgtctttagtcactatctactgctgtctccgggaggttttcaaatgccagtgcttcctgagacagccagttagttcgttttttttgttttttgtgtttttttttttttttttttttttggctagtgatagggttttctttcatatgacagataagacatagatatgaataattaaaaccctacatcccagcaggtttctgtgtcacctagacttagaatgggctggctggggtttcaaagatgtaagactcaaatatgagtctgtttggtatgaaatagcagaggcaagatggaggagcctcctttggccctttaaagaatttgtgatccatcctcatcctattgccaatgaggctggagagaatataaggccctaaattagtgtaggaaacaaagtccactttctggctgacacttcaagtacaaggcaagcaaacaaagcaaagcatggtggtggtgaggggttgggggttggggctaagaagttcaaagtcacacctgagactcagagcccatctgatgctctcatgctgtaaagctgcggtccaaatacaggcacactttattgagagtttaaggcagtggttctcaaaacttggtccctgagccaacagaatcagcatcagctgagaacttgttggaaagataaattctcagggggtgagtcccagccatcagtgtcttaacaaagaaattctgatgcatagcaaagtgttgcaaccattgatttaaggtacacctctttatatcattacgaataggtctagtgatataagaaaaaagcaatagatttatgattgtatcaattcaccaatttggaacttaactattcattcattaccatttattgagtgtcaggcactttgataggtttcaattgatttcatccttaaaacaaccctgtaggatatttttatcctcattttacagatgaggaaacagagattcagaggtgttaggtgacttgtccaacatcacacagcaaatacttgtcttgggatttgactcacatttctggaaacatgctctgaaaatatccaatcccaaggaagtgcttcatagtcaagcagaaagacagatacacaagcaaaaattggaaaaccttactatctacgtagtttcatggtgatgaaattaaccttttcagcatgcaaagagttaatcaagctgatgttcccttaaaaatctacataaactcttctagactaggggggtttggtaaagagactaagcaagcagtctttctatgtacagtttataatcatggaatcctgtataaattgttatatttgaagaccatgacatttttgaacacctgctagtgtgcaaatcattcagtaaacatgtatctagtatgtatgtacagtactgcattaggtagtactaatgcaatatatatatatatatatatcatatatttcttgctaatgcagtactgtacatacatactagatagaaactaaaaaagctactaatagatggtctcaagttgtttaaaagactcttatgtatgaaatcattaggaaacaataaaagatagaatatcagggcctaaacaacatgacgtaatagtggttgagtaaagggtgagatcagtgaggctcagaacacccattctctgtaaataattcaagccaccagtgttttccagaagaataagtctgtatgattggtaaaatgaagttagttactctgggcctagggcaaaagacatgaggcatagcttactctgtgtgtgtacttttgtgtatatatgtttgcatatatatttccaaagtatgagagttggttatgtatgtacatgtaaaacatcaacagtaattgctgaattgcccccatcccctgcaagcagataattctctaacaatgtgtgataacctctctttgtattccttaacatgggaggtttattattccttaatgtggggcatttattatattttaatctttactaatttagtaggaaaaataatattgtttttatctgaatttataaagagttataagtttgagtacttttttgtatgcctatttcattttatgtcctttgcagatagttttgattgaagggtttccttaattgttaagagttctttgtactgtatggatagcagcctttgttgtataagttgcatatacttccttttgtttgttctttttttttaaccttttttgtgtgccatatagaactgttacatattcatgtacacaaaagtataaattatacattccctgtggcttttgcatttttctcctacttagaatttcctgcttcaaagcaaaattatccatgttttcatccagttgttttctggttttattttgtatacatgtatttttaagaaatctaagttgtatttgttacaaagagtgaggaaggaacttagcttcattgttttttcttctagtggccaaccacatgttctcgacccaatcattatgaataatctaccttttcccccactgatttcaaattccacctctattatatattaaactcccaaatttacttgagtgatttaattatttttgaactagtttttagacttcctggcatcttccccatatcagtctatgctcctagaatcaattgctagttaataagggaccacatttgtccaaacagcttcctcttaacactgcctccagtataatttacagaaaagaagtgagatgcagttttaaagagtatttttattaagaatataagactcgtgatttttaatgaatatattctccaagaatgtaagatccatgaggacctagagcagtgaacagagaagagcagattcctaataaacatgtgttggatgaatgaactggagctttagtattgtcttatcttctttactttctaaaaggctaacatagttcatccagataagaaagtaatacacctaaatggatataattcagccattttgtgttgggtactatgtgttaaaagccataaaactttctgagaatctatctgaagaaaatgaatcaaacaggaaagggaaaattacacttaaaaaattaccctttcagtactctttatatttgcaaaatgttggtaacaggtaatctaaatgaccaataagatgagtgactgataagataatttagaagcaaatacaaaagtagggatatggcatgccaactattaaaacacacatacacacatgcacgaaatgggaaaaacctagaatgagttacatgaaaaatgataaattgtgctgggaggtaatatttcagaccccatttgcttattttcaaaatgttaatgcagttttttgtttctacagtaataaaacaaatagcaccatgaatctagtttaatgctcagttgaggcataggtacatgtacagcatccttagttgggctttgtttcacaatattggctgctgattcaatattttgagctttatgcagcaagaaaggggcaaaacaaaaggacatttactagcaaacccatggacctgggcctgtatttgaagacccaactatacaaatgtcagaagttctgttagccttttcagaatgaatgtgtcccaaaatgatgcctactttccattctgtgtgttcacacgcaacacatttctttaaatctcatctttccaagttaaccaaatatttcatttgaatttgcagatcacagagtgaatttgattgatacacatatctgtggattctattgtggctacaaaataagtgaagtacctcccactgatagtcactttttaagctctgttttcaatgttgtatattctaatgaaatcttgttcttggtaaaatatcatagccatatattttgatctaacattttttaagagttttgaagttgtgtacctagtgccaataacaaatatgaaagatattttcaggagggtggtggcaacatttttaagaggagtgttctttataatggcccgtgtgcgtgggaataccttggggatgcagaacgcttttttatacctctttgctgtgcgtctttgtagtgttcctcaaacagagctgttgtctgtattgctcacatctcctgtgaaatctaggcactcccatagcatctttggcatcgggataatctggattagtaactatattattgttttattcttcagttttctacagctataaaagtaccttttcagatcacatttgtcttagcatccaagaaatgtggaatacagaattaagaattaatatggaatatgaaattaggaacattaactaatgtggaatatgcttaagatatagacatgatattagatggcctgaaattagttcacaggtgattttcagtgttctcttttcatttgttacctgttggattttggatgttggaagcaagtgatttaggtgaaaatggcaatggcgggcaggcaaggcctgcttctatgagctggtttagtactaggctgttattagatctgcctctcccttttccccttcacatgttcaaaaaggagtaagcatgctagaaaaatataggcccaggtccatggatgtgcagaactggcacttgccgtagcaagggttctcaaaatgtggtctctggattaactacatcagcatcacttggggacttgttggaactatagattctccagccccgcatcagccagactgaaccaggaatgctcgggtgggtccagcagtgtttccacaagccctccaggtgactgtcatgtatgctggagttcaacacgactcttacaagaacagaaacttcacccacaactgtattctcgctgtcatcacctctctttatgactgcttaatacataaaatccaatttcaaactttagagaaaggtacctctagatctgtctccattctcactcctcagaggagccatttctgatcatttctgggtttagatatattggtagtccttcccaactcttaaatattttctttatgtatcatctctgataaccatttattgcaacctgctttgagagatgaggatttagcttacttatactcccctttctttcctctggctcctcccaattgtttatcacttagttttttgaaattttggttcttccagagattacgtttataactttaaattcctaagtctttactcattgaacttagagagtactatgtaaaataaatggatatccacttccctactcccccttttctccctcccttcctctttcagataaaccattaatttttattttatttgttatgctgaatgcaaaaccactaactttagattattgacatttttattttactgtgataaattatctaataatgtatatatacattgcttctgaaaattggaaatagtgtttgcaataggatgattgtataaatattattcattgcagaataaagggataggactgatctttgacttaataactcacccacgagtatgtgtcctcctgtccttgattgcttgcctgtgtttggtctgcagccttacactgtatcataagaacatttcccaaagtgttttctataggtttttaaggaaaaacatggcaaagtaagtttgggagacacttgagtaaacaaacacacgactgtagaactcatcaaagcctttagtttctaatgagaattgttaatcttcaagagagggattggtatatagcatttctcaaatgtactgggtcatggaacccctttttcacaagttatctcaatgacttcatcttatgtagaaaatattttggaaagcactgccatataggatctctcgattccagatccagatgacctcatttctgcctagattctacatccagcctattacctaacttgtctggttcaatgctcagacttagtgaaccactgctcactgagatcctagccctgacttcgacccaagaaaatacattttctctcagctaccgtattagtttcaaagagctaatgtgtatgatccatgatgtaattaagtactgccaataccattgcctcagtcagagtgtcccttcactgattgtcttttatcagatcatatgatggtgatatgcatgtttcctaaatgcttggtttctcttaagttttcctccaaattgtcctagaagtagtaaccttaaccagccttcccctctgaagatattttctttctgaaaagcagagccatctaataataaaacaaattgactcatttaataagaaaacccctgaagtgcgtttccagttcttaaaattttatgattcaatatccgaattcttatctactgaaataaaaactttttttattttggaaaggacttttttggaatactgcagtgtaggagatatttaatttcagtctgattcatgcttctcaagataaaatataccatcctgaggacaaaggttttgtcatattgcagcatactgcaaagtctaggcaagcacacgaaatggaacacagagtagatgcttaataaaaatatttattaatttttaccaaatgaaactttcctaccttttctcctacaaatttggttcgcttccaaacccactccctctcatgaatgtgtaggaagctggtttatatttatctttctggaagatatctccagctaaaccaccattgagatacttcttttttttgggaagatgacaaccatttaccctaaaatatgatattataacaaaaaacctatgcctcttgtgaattaaccctatcgtggtctacttaaaaaccaatctaaacatttttaacctaaaattaggtttcttttgactaaactgtgtattttgcataaccattcattcaaaaaccaatcactcagtgctgactctctttaaagcactatgccaaacacagaacagaacacaaaaaggaaccaggcacgatctctacccttaaatgccccctctttacttgggaaaaatggacaggcacataagtggataaagtgcaaagcagaagcctgccatgtaacaagaccatgaatacaattcttttggagttctctgaataaaaataatattcatatttaggttattttagtgggacctctgatattatctacttatatcaattaattatgagccctaattggtagcttctgggaagaatctagggaaacataaggcctgttttgtgcccttgaaaaacttaatcagaagacaaggcatgaatgcaaataacaataatgataataataattgaggaggtaaccaacataagccagaagatacatgagctcttataaagtagagcatgactaatcaccagaagaacagatttgagtttcagaaactctccctactggctttgattcattttttatactttctcaagaaatcagaatgtcccagatgcttagtaataacaatgtagagttgagtagcccatgtcaagactggagagaaaagaaagatcagaattctcaggagcagcatcaatgactgaggaagtggtcagatggcagtggctttgagcagactctagaagggataagagacagccaacacagaatgacggcttagaagttctgcactggagtcaaataaccctgggtttgagtcccagatctaatactttgctcattttgaaaacttgggcaagttttttaatctccttaagcctctgttttcttatcagtaaaatggttacgataatagaattcatagagtcattgtgaggatacagcaaaattttgcacatgaagtgtttagatcagtgtttgcacagattaagtgcttagttgatgctggctgctcagcgttgccaccgtttgtactactgcctctatagtatcttctctgatctgtaagaaaaggtaataatagtatctctggccaggcacagtggctcatgcatgtaattccaacattttgggaggctgaggagggaggattgcttgagcccaggagttcgagaccagcatggccaacatggtgaaaccccatatctactacaaatacaaaaattagccaggtgttttggcacatgcttgcaatcccagctactcaggaggctgagacatgagaatcacttgaacccgggaggaagagattgcagtgagctgagattgcaccacttgcactccagcctgggcaacagagtgagactctgcctcagaaagaaagaaagaaaaaaacaaaaattagctggccctggatatatacaacttgtagccccagctacttaggaggctgaagcaagaggattgcctgactccagtagttcaaagatgcaatgagctataatcacgccattatagttcagtactctggataattcagtactttaaccaatacttagaccagtggttctcaaatatctgcatgcatcagactcacttggaaggcttgtttaaagcacaggttactgggcctcaccctcagaggttctgcctaggcaacagagcaccctagcctgggcaacagaacaagattctgtctctaaaataaaattttaaaaagtacctcttcatacatggaaaatttttgtgagaattaaatgagaaagtatgcagaaagcttagccagggctgcagcttcctattgcatgacttctacactgcacatttcaagggaggcatcaatctgctcactgtcatcatagatacatgtaatcatcagtaccttttcttgaggaagtgacaattattttccaatttgcaaaaagtcatatttgttggcagagagctgggaaacagcaagcgcgttgtaaattctagttagtaccgctactgctgctgttcttgccgctccagtaattcctagtatttttacctccacttctactcatgttttctgttcaccaaaagcctcaatcctgccctgggaggagaaagttgtctggacaaatcagaagagctactctggttttattatttcatttactattttcaaaaacagtgtaagatacatttgttttgcattttatagagaaagaaaatattctgctccttactgaaaagcctcaaatggcctcaagtgatagactgataaagttggaatataaacttagctttgtatatatttttctgataacacatacagcctgctcagatgaagtgcctgtccttgttttacatgacagggagaactgattcagagaccatatgagaggattatggtgaaataggtatgtgcatgggacacgatgacatgtttataattaagagagacatgtacaggtattatcgtatggtatccatcctttcctcagagaagagttataggattctaaggtttgctgatgctttatctctctattaacattttaattttattccacaatccagaaatatgattggcctctgagtagattgcattttcatcgcaatgcagaaaattaaactcccacagatgttagtggaaaccatatagctatgcagcaatttcaaaatgtaccacttaatgtctgaaccttttaatcatgctagaattttttttttctatcaaataaacacaaatctattttggtactaacaaagaaaagaaacaagcacacattctatttcactccactcttggagtatatgctaattgtctttggaaacccaccaaacatctgtgaagctctccccaagacttcatggcttccagacccaaatacggctcctatttatttggagacaaccaaacaaacaaaactttcaggtaactaaaatttttctacattaaatatgtttggcctctgagtagattgcattttcatcacaatgcagaggattaaactcccacagatgtgggattaaactcccgctatgggggaaaagattctaggaagtgtttaaagggcaagcctgaattagggatttatttagaaaagcagtatcacagttttatcaaaggggagaactttcagcccagtctcctctaccttataaatcaccatgggagatgatgaattggggaggcaatagttcccacaagggctggggggacacaacgtcatacacatccttgaatttccattgcccaatacatgttgacataccatgcacgtgtcctgatgctgttgaccttctgcattctactgaatttgagaaatgtctgcttatagcccatttctcttacaatatcaattttgtaagtgtggctcctaggccagcagcatcagcatcacctgggaacttgttataaatgcacattcttgagctccagtccaggtgtattgaatcagaacctctgaggtgtggggcccagtaatctgtgttttaaacaagtcctccaggtaattctgatgcaaatggtctaagtactggctaaagtattgaattaacctgagtactgctttctatgcctgctggatgggggaaggtttattctagcctattgcccaatctttatactagttaactgtttgtactttaagtcaatcagtactctgtttcacactatactgaacctcagagtgcagagaagtgggagccaagactcgggaagaaatcagagatggagagagtaacaggaacacaggtacatctttctcagtacaggtgagagaggtcaggcatccagcttcttcctcatagttcacaacagcaattcaagcatttgtaaacagtgggactgaggttaaaaagtggagccaaatgaaatgtcatatggaaaatcaaatataaaatcagataatgggataaattcaatgcttcttcactggccagtcatatacaaaatgctttttcctaatatggtactccaataatatatttttctactatagcactcaccaggatgtgtgagtaataagaattacttgttaacctatgtttataaaactgtgaagtcagggaatatcttgctttattcatttgtggtatgccttagcacctacctaacatatattagggggcttaatggatagctgtggaattgaatcaggcacttctggtttggggcaagctgcatgcttgccaattatgagataaaagagacgtcactgagagtgaaggggaaacatactaagaagacaaactaggggaaagctcaagagattgtggggtcaaagaggagacatggaatttaatagggaaagtattcagtcggagcctgataagagaaaatgctatgattgaaagtaggagtctgggattgaaaagagaaaggagaaatggtgggaaaatgtgatgtttggaggaaaacagagagggtcatgtataaggatcagaacttagattatagggcttggcaagaatggagaattcagaaaacagaatggagcaagatgggggcagcaaagaaaaaactacatggaagacatggaactaccttgagcagtggaagaggagaggataaaatcatggggctggggaactagtattttctattttacttgatcatctggacttaaggactttaaagttcattgttatcttattgtttcataaccaaagcgaagtccaactcataattaaaccatctgttagtgtccccacactgcccaactgtcttcccagagagccccactgcataatttggtcttggcaacagaaattctttatcttccactgtttgtttttttttttaaagcctttttcttgatgacaagccactgagcagcaattcctttctgcagcctgaaaaccaagaggccaggccagcaggttcaggggtcagttcatcattcaggtgccatcctcatctgctggaccgcaaagagaatgtagatgcacacaaaatggtccgagggacgagtccttctctttgtctaaacattgggtacttttcttactgaatatacactttgttctgtgaaggtgctctcaatcttcaaaggggtctgagctagttaaaagcatcatctggcatcagtagatatgctggctattcatttacagttgtcttacgtaaaatgcacatttaacttctttttttagtaaaccactgatagctttttcttaaaatgcacattcattttagaaaatatagataagccagctagctaaatatgtaaatagatagatagatagatagatagatagatagatctccagattccaccatacccgaaatatgcaactactatgaccattttggcattgtgcttttctgtgtgtatatgtgtttgtgtcctagcaaaaagaaatgcattcctgcaggaaaaatgcactgggagaagagcatccagggcttacagtttacattctgtattgtgagctatcagttgctatgatttactgaattgaggggtacgttatgagaaagtgaaatctgggttttcatctcttccctctcactcttacattttaaacttttctccttctcaagagttttcacattctcctgcaaatatgctcaactctctcccagcctaattaagccttagttgcccccaggacctccaatgcctgcttctccccttttaacctcaccttttgcaagagtactctagtttggcctcgactccccaacctgccccaatgtgacttttgcctgctccttggcaccagcttcccccccccgccaaactatgttaaaaatcctctcaataatgcaccagtgatcatcaaacttccgcatccgaagaatattttctggtctttttcttactgggcttctgaattatagtgggcacttacggttattgctccttaaaattctcgtctattggcttctgtatctaagcctggctggctttccatctctgccacctagaggtagctgtgtaattttggacaagtgtctccacctctctatgctttgtttgcctcattggtaaattgggcataataatagaatctgctaggtagggttgttacaggattagatgaattaaaaatttacaaatcaattatactattacctcaagaaacaataataaatgatgatatggatgatgtcctgccatacctgcccatttttaaggttagtttttaagtcaagaccgatgagctcattaaaattctgatcactccatctgtagttgctcaaaatcctaagttccaaaattgccttcattgcctgtgtttatatagtttgatgtcttgccctggtttgctattctgcagctgtttgtaaaggctgcaatttaggtgggccaacctgccacattcaccctgccaaacagcaggaatggtccaggcctgacttctcatttgcagaagagaaaattttatagatggtctagaaaagaacaacctcctggttaaagcctaccagaaaaaaattccctctactatgcagagatcatgtgtttacagttttttttttaatgtcccacagtagctttattcctttgagaaaacaaaaactttttttctagctgcttggagattgaatgtgaagtagagcttgtctttaagattcttattagtaaccctcgcttcccttactagccacaacctcattcttgttcttgagcatccaggagtctctactgcaaactcgggaagcattccataccgtggattgtaatcattttttctatttccttaacccccagacatacacacgcatgcacatttttcttaaaatccattttctcaacatggtgtaagttgaaatagaggacctagccccagtgtcaagtgtctccttgaaactagcctaatagtgggaatataaatataaggtcgtataaagccagtacagtgtttcaaacctcttaaaacctgatgaaagtgatagactccaccttccactccagatatacgttaacacccagtaggcacataattgtttgaggttcatgaatctcctgaatttgtcccatggagtccagtttaataataaaaaactcaagtttagattattatttttatgcccataagatgctaagttataataaatttatcactagaaggggactgtactgggctcttgttctcaattttaggataaaacatttcccatttttttagctaagaaaaattttactgcatcataaaagacttcagaaatccatcatcttacattagaaaacttgctgcgaagttatgcaaggccactgctttcccttaaacctcctggagtcaaggggagagaccctggcccagcaacttgggatcaatcagaaaattagcccaggaaactcatctgggtcttccagctctgctcctctgcacctagatagacttgaacctctctaactggcagatatgtaataaagtacagtgatgctggcttgctaagagtgcaaattttaaccacggtagtaaatattttatgaggtgcggggggaagggaggattgtggtgtggtggcttttgggtgctattaatatagatcacttttatcaggggaaacatttgtcattgaagtacagtttcaaattaaataaattacaaagattattttatgtggtcaaaataaacatgtgaagcccatattcattgtattaagtgttggtaaaaatctttattaggggaaaaagtataagataattagtaaccaacatattcaagactgcagacattgtggaagagtctatgtaacagactaatagagattacccaattgccatcacctgggatttttaaccttttttagtgtagtgttaatttctgctctctgccgaaattcctgtgagcacataggtaggaaatgaaacacaactaaccaatacatgtatacatcattagtggacaactgatggaagtaaataaaaaaatataattagaactaaatagtatcccaggttcagaataacaggataatatgtgttttcattgggttcatctgtagaaaagaaaattttctttaaaaacactatgagaatggcgatcattaaaaagtcaggaaacaacagatgctggagaggatgtggagaaataggaacacttttacactgttggtgggagtgtaaattagttcaaccattgtggaagacagtgtggcaattcctcaaggatctagaactagaaataccatttgacccagcaatcccattactgggtgtatacccaaaggactataaatcattctgtaaaggcacatgcacacatatgtttattgcagcactattcacaataacaaagacttggaaccaacccaaatgcccatcaatgttagactggttaaacaaaatatgccacatatacaccctggaaaactacacaggcgtaaaaaagaatgagttcatgtcctttgcagggacatagatgaagctggaaaccatcatcctcagcaaactaacacaggaacagaaaaacaaacacagcatgttctcactcataagtgggagttgaattatgagaacacatgggcacagggaggggagcatcacacactggggcctgtcggggggttggggtctaggggagggagagcattaggagaaatacctaatgtagatgacgggttgatgggtgcagcaaaccaccatgacacgtgtatacctatgtaacaacctgcacattctgcacatgtatctcagaacttaaagtataataataataaaaagatgctcaaaaaacacactatggaaatttggagactttagatgtatatccatatgtcccattttatagttctttatcaaaataaaaagattaaagagactttaaataacctataaaattgtatgtttttatacttcaatgcctgaaaagggtatatatgtgtacacacactttaaatagaccctgctaattagcctaaaatttgcttaatgttagaatactggaatggtgtggtttattcttatttctattaatcctcccaacagatccattatttttgtcttgtaaccactttttacggttcagtgatttatctgatactatcttaaagcatcgattcttggaatggtcaaaattaaaccacatagcagcaatttcagaggcggaacagagccatcaaaatatactgatgccttcatttaatactgtttagaaattagaatagggtgctcttatttatatatttatttttggcctttcccaaatatctgttgtgttccttttcttcctcctcagtagctgctgccaaacaaatgtggcaatactgacagttgtcactttacagcagccttgccattcccttctgtccccctccatgtgtccctctcactgggccaactgggaggtgactacaaaggggtgcaactggcagaaattagtaaacatttttctaaaagttagaaaaataagtgctgggtgctaacatcagaacagtggcgccaacacctacatactcagccctttgtgaaattcatactttgcattagaatatgtacttgatatgaggtgagcttctaaaaagaaattgtgtcctattttcttgacacattgtattaaatattatgcgtataattaagctacatatgtcttcaccaggaaattgctagtcgttctgaataaagcccagaattgcttctttatacttttctcaatttagaatcagaaattaaggaaacatgcccatttgcatgtgcttctaatgacagagatggaaggatgtcttaattagttttaatcatgaggagaatggtaactagctgatgtccttttttgctgaggttagcacaatagaaaatgggcttaaaccgcgacaaaaagaaattgagttagccatatggataaatttcctgatgttatgagttgttcaaatgaattactcagagactaggtctgtagtttaaaaaaaaaagaaaaaaagatgttacctaattaaagggagaaaagaatcaatttctttctgattttatctttaaaatggtttctctgcaaaggtaatttaatatttaatattcatttctgaatgaagtcaggtcttcagttctaattggttgcttcttgcaataaattaataggtgttagtttaaaatataaactattttttaaatctcctggagaaaattaatttgttttattgattagcaaattttaactcaaggacagtgtgtttgtcaaaaagactgacctgtttggatttgccttgaaagaaggatgggcaggaaggagattctaggcctcaagcaagcttgaagaatgacctgcaagttcgctgcaatgagagtctttttgttttttttttttttttaattaggctgttttaacttcacaggggggtttcctccaaattattgagatcttaacttttaaaaaatttaatcaatcccattgtcgaaattttttaaagtaagtcgtctgttaactcgtcaaccagagaaaaacactgtttcattttgttttgttttttttccaatcttctgtttaattttggtgtataacacatgtagatacatatttataaaaataattccagatcttgtttattttacttagcattacagcctaggcatttttatcagatcatttaatatttcataaacattgatttttttttattatactttaagttctaagataaatgtgcagaacgtacaggtttgttgtataggtatacacatgccatggtggtttgctgcacccatcaacccatcatctacattaggtatttctcctaatgctccccctccccatgcccccgaccccctgacaggcccagtttgtaatgttcccctccctgtgcccgtgttttctcatagttcaattcccacttatgagtgagaacatgcagtgtttggttttctgttcctgtggttagtttgctgagaataatgatttccagcttcatccatgtccctgcaaaggacgtgaattcattcttttttatggctgcacagtattccatggggtatatgtgccacattttcttcatccagtctaacattgatgggcatttgggttggttccaagtctttgctattgtgaacagtgccgcaataaacatacatatgcatgtgtctttatagtagaatgatttataatcctttgggtatatacccagtgataagattgctgggtcaaacagtatttctagttctagatccttcaggaatcgccacactgtctgccacaatggttgaactaatttacactccccccaacagtgtaaaagtgttcctatttctccacatcctctccagcatctgttgtttcctgactttttaatgatcgccattctaactggcgtgagagctcattgtggttttgatttgcatttttctaacgaccagtgatgatgagcttttttttcatgtttgttggccgcataaatgtcttcttttgagaagtgtctgttcatatcctttgcctgctttttgatttattttcttgtaagtttgtttaagttctttgtagattctagatattagccctttgtcagatggatacattgcaaacattttctcccattctgtaagctgcctgttcagtctgttgatagtttcttttgctgtgcagaagctctttagtttaattagatcccatttgcctattttggcttttgcattgcttttggtgttttggtcatgaagtcttcgcccatgcctatgtcctgaatggtattgcctaggttttcttctagggtttttatggttttaggtcttacgtttcagtctttaatccatcttgagttaatttttgtataaggtgtaagcaaggggttcagtttcagttttctgcatatggctagccagttttcccaacgtcatttattaaataaggaatcccttccccattgcttgtttttgtcagttttgtcaaagatcagatggttgtatatgtgtggctttatttctgaggcctctgttctgtttcattggtctatatatctgtcttggtaccagtaccatgctgttttggttactgtagccttgtagtatagtttgaagtcagctagtgtgatgccttcagctttgtactttttgcttaggattgtcttggctatacaggctcttttttgattccatatgaaatttaaagtagttttttccaattctgtgaggaaagtcagtggtagcttgatgaggatagcattgaatctataaattactttgggcaatatggccattttcacaatattgattcttcctatccatgagcatggaatgtttttttccatttgtttgtatcctgtcttatttccttgagcagtggtttgtagttctctttgaagaggtccttcatatcccttgtaagttgtattcctaggtattttaatctctttgtaccaattgtgaatgggagttcactcatgatttggctttatgtttgtctattattggtgtatagaaatgcttgtgatttctgcatattggttttgtatcctgggactttgctaaagttgcttatcagcttaaggagatttggggctgacatgatggggttttctaaatatataatcatgtcatctgcaaacagagacagtttgatttcctctcttcctacttgaatacctttatttctttctcttgcctgattgccctggccagaccttccaatactatgttgaataaaaatggtgagagagggcatccttgtcttgtgccggttttcaagcggaatacttccagtttttggccattcaatatgatattggctgtgggtttgtcatagatagctcttattagtttgatatatgttccatcaatacctaattcattaagagtttttagcatgaagggatgttgaattttattgaaggccttttctgcatctattgaaataatcatgtggtttttgtcattggttctgtttatgtgatggattacgtttattgatttgcatatgttgaactagccttgcatcccagggatgaagccaacttgaacatggtggataagctttttggtgtgctactggatttggtttgccagtattttattgaagattttcacattgatgttcatcagggatattggcctgaaattttctttttttgttgttgtgtctttgccaggttttggtatcaggatggtgctggcctcataaaatgagttagggaggagtccctctttttctattgtttggaatagtttcagaaggaatggtaccaattcctcttcgtagaattcagctgtgaattcatctggtcctgggctttttttggttggccggctattaattactgcctcaatttcagaacttgttattggtccattcagggattggacttcttcctggtttagtcttgggagggtgtatgtgtccaggaatttatccatttcttctagattttctagtttatttgtgtagaggtacataaacattgatttaatgcctgcagtacattccaccatagagatataatccttttatttaatcacttctctattattgagcattgcttacaattgctcctaagtataaataaagatgcaatgaatatttaatggtaaatatttgtccaaatttaatgttatttctttagcaataacacttttaactctgtctttgaccatctaaaactgccaccatcttataactgatttcataagcctacataattcaataagagagattgaaggtattaaaaatgtcacttagacttctatttcttgttgtatttgcttccattgtttcaattgttgtctctcagaaaagtcaccactgcatcgacttgagttccctatcttggaaatatctagtttaagtgaatcaagcctacgtttgaatagacaaaacagacaaatttgaaaaccactggataccttttagaagggattctttttttttaagaatatgttcactaaagagtttatttaattgatgtcaacccaagagtatgtaaaatacagccaaacttaccaaacttccatttacacacacacacctttctaaaaataaatcattttgactctgaaacagtagtatgcgaacctggatgagactccagttgcctgaagagtgctttaacaatacagtttactaggcctactaaagcagaaagtccaatgagtggccctagagaactggcattttttaaatctgacctgttaattctgatgatcagccaggctgcggagctgtagagtcaagggcatcttttaggttttatcctatgatgctaaaaagatatcaaacagaagaaagaaggcatggaagagtgaggaacgtctactagttaaagtgacacagcctttgagcctctcttttacttccaagaaatcccatagcactctcccatatcctcacccttattcttttctggaccatttaagaggacagggagggactccagatctagaagacagttttactgcggtataaggagaggaaaagattagtagaatgtgggagtcagtgcaaaagtaagtttttgtataggcagtatttaccaaccatcccactgttctaaatttacatattaatatgtattgtatctgtccacttagaaagaaaaaacaaaaaacagcttgctatcttaacctaagagaaaatgtgtcttgtccccttcctatctcaaaagagagaggacagtcaatctccataagtatttatttgctaaatccatgtgcaccctgaatatcagtagcccaagaacctacgaaagaataggcatagaagtgaaggatggtcataactgtcacctcgccctccattgatgccacacttgaatcaatcagtctggctcttccttttatgccttcatcccaccgaatgtttaggaaagctgcatgctccgataaaaataaagatctgacttgctttatgaggccagtccctgccttaagagagcttacttttttttttgagacggagtctcggtcgcccaggctggagtgcagtggcaccatttccgctcactacaagctccgcctcctgggttcaagccattctcctgcctcagcctcctgagtagctgggactaaaggcgcccgcaccgcacccgactaattttttgtatttttagtagagacggggtttcactgtgttagccaggatggtctcgatagcctgacctcgtgatccgcccgcctcggcctcctgaagtgctgggattacaggcatgagtcaacgcgcccggtcgggagctcactttttaataaggagagaagacagggaatccacatccacctattcatttaaatcactgagtgtcagtaggagggtccctgagaggggttgtgagatttggctgatcatttagagaacaggtggcagcgatggtcagagagtcttccagggagactatgactgaaaggagggagaggaagcgttagaacccagagatgaaaaatactttttcaagttcaaatatttagacgtggtatgaaaaaaaagcaatgatagatactcacatcaggatagagaaagatttggaggtaaaagtaaggtacgggctctcactgaaaattgttagaggcaatcatcagaacttcccccttgatcttgagtcaaatgacacatggaggcttgtgtcaaaactgataccagctttggctttcttaagcaaaaggtaatttatttttattattatttttttaacttttaagttcagaaatacacgtgcaggtgtgttatatatgtaaacttgtgtcatgggggtttgttatacagattatttcatcacccaggtattaaacctagtacccattggtggtttttccagatcctctctctcctcccaccctccaccctccaaaaggccccagtgtctgttgttcccctctctgtgcctatgtgttctctttatttagctcccacttgtaagtgagaacatgcagtatttggttttctgttcctgtgttagtttgctaaggataatggcctccagctccacccgtgagctgcaaagggcatgatcttgttctttttatggctgcatagtatcccatggtgtatatgtaccacattttctttattcggtctatcattgatgggcatttaggttgattccatgtctttgttattgtgactggtgctgcaaagaacgtatgtgtgcatgtgtctttataaaaggatgatttatactcctttgggtatatacccagtaatgggattgctgggtcaaatgatgtttctgctttaggtctttgaggaattgccacactgtcttccacaatagttgaactaattttcactcccaccaacagtgtataagcattcacaaaggataattttctgaaagataccaggagcttgtgtctaaggggagcaggagacccagggttggaaaacagagaatcagtaaaagtgtgttgctcattttaggtgtcaggaatggggagcatgaaaatccactcctcatagtttgatccaaaccatcttacaattttatggtcattgcagctaggaaagaaagccctgggttggtggtggaggggcaggggggtggtctcaggctggcagttaagtgttccagctgagaaaggacatgtataatttccacctaccacccattggccaaaagtggacatttgtctcctgctaactgcagagagatgtaatcttctcacaggcacagaaagaggtgaaaaccatgtatagggaagtattcagtgcctctatgatgggagcaagaagcaggacaggtccagagaccaaggaaataggaataacagtaaccttatctcagatggtcttgtctgggcagttccactggtacagctgaagctgaacaatactcagattcattgttgctgtcattaagattcaaatatcagagaagaaatgtctgattagcctagcttggttcaagtgttcaccatctaaccagggtaagcagagtacattatgggtagtgacgggctaagagttaaaccctaaggaaatcaaataattttagggagcagcctaggatatgaatatgagctgtttgtttaacagcaagaatatccacctcaatctagaggctgctgggagtacctcatttcagtattcaccaaatatttattaaacaactactatatgctattctaggcactagggatatagcagtggccacaataaacacaactttactgctcaatgaccttatatttttaatagataatcttggttggtgaatcgctgagtggcatggagaatattctagaattgtgagagtaggaaaagattttatggtctaggcaggcaaagggagagcgctccaaaaaaagaaaaaaaattaggagacttacgggtctctgggcttctcattcctgaaagatttcaaactgcagctgactggccatttaccacaaatgttctagagggattgcatggattctgtgagatagggagactgagaacagccttcacttaggctccttccaggttgaaagttcagggaattaatgagagcccaataaagggacactgtcactgagaaacagaaacatgaaatgagataatttgagcaatattgtaatcagagagaaaatatttcttcttggcaggagcagactccctaggtcactctaagtaaaatcttaaactggagatccagatgagcactcagctaatgatggtactaataagtccctgctgccacacatattcaccttccacttgcactttgtcttctgtcctggcaccaactgtccatgtctaaggacatattctcgacatgtacatgagattcatctattcttgccaactctaggacatcactccagcatttctcccttctctttctgctttcatatttctctctgtagtgggtggttcccattagtatctcacatgcttgtcccctgtcttcttctagttactacctctttttctgtgtccctctttatagtcagatgtttgagttgctcacattcattgcttccaagcctcttctctgggtccctcacgaaccctctctaaacgacattatcccttactacatcatccatgctgcttttgcaggaacacaggtggcctctctaccacaaaatgcttcaatcagttctcagctctggtctgacttgccctggcaggagcatctggcacatttgaccacctccccctctttgaaacatgttcttcacttcacttctaggacacctctttcctgcttgtcttcctaccttgctagctacattttctcagtctgatcttttttcatctctccaacttctgaatgctggcgtaaccatgagctcagtcattaggtgatatcccttgtccatttttcgttttcccttggtcatatcatccactctcatggcttaaaaaacctggcaatatattgataactaccaaatttatatttccattggagacatctcccctaaaccctaaactctagaggtgtgtgtgtgtgtatctctaatagcctactgaaaatcaccacccacatgtcgggataaacaatgctgctgtaacatccatattgctttggaatgcacaattcccatgcattttggcctgacttccagttgtaaatatttataacttagccagaaggctttctctagcactagagcctagtcagcctacttggcctgtgtatgaggctgagttaactccctccataagctgctgtcaaccagtgactgatgggagctaaaggatgaatgctccagctcgttcacttctcagggacttctatgctcctgcacagacatttgttttgaggtatcttctgtttctcagagttccccagagagattgagttccagttgcctatggtatcaactggcttgttaatacaccctttactggagtccgtttcttacccatctcacttcaattccctgtgatgtttcctgggatcatctcccgggtagattacttgcactcaaatgtgtgtctcaaggtctgcttgtggggatatccaaagatagatgtcaaatgggcatctcaatgataacaagctccaaaccaagctcacgatcttcatgcccaacctgctcttcccatagtcttgcctgtctcagtaaatgaagaacttcttccagttacaggtcagaaatctgtgctcacacctcatactcaattagtcagcagatctgcctttaaaatataccccaaattcaaccactagattttttttcccccccataggttttcaccctctggaatagtataatatttgacatttcaaaattgtttgtatccagacaattttataagaaaagcagtgttcatttgttttgtttgtcactgtaccctcaatgcctaaaagagagtctgacatacattaaacacacaaaaaaatctgctaagagagttgcacggatgcttaaaaaagttgattaatgagaaaaggccttggggaagaaagggataaaaggatgctacagagaatgcttggggaggatgaatgtgcttttttccagactaaatgtctttttttttttgacaatatattttttatttttattttttcaaataataccactactgtttaactatagccagcactggctaaaatttttatattttcagagctgaagttggtgaagacattcatgatttaaacaccagatcctgaaaggtgttaaatctactttgaaatgaatctgcaatcagtatttcaaagcttttctggtaattttagtgatcttatttgactagactttttcagaagtactaaagaaattttaacaggtttttattaatgcacagataaatagaagtatagtgaggtctatagccattttattaaaatagcttaaaagtttgtaaaaaaatgaatctttgtaattacttaatatattagttaagaacccatcaagcttataccaaatgtctttattataaaaatatttatacaactagaaaataatcctaagacaactttagatactcaaggtttatcaccatagggcactacagtaaaatattatgttacaaaagtagggaggtccaaaaactagggaatcatttttagtaatggattctgccagctcgcaccccccaccgcaagagttctgtgtgctcagatttacagaaacttatctattcatgtgggtatattgaaaaaaaattgaaatgtccagaatcactttaagtgaattactgtcagggtcaataaatgtactgttctcatgaccctgatgatcaacaaaggggaggcagggctccacagtggttagagaatgggctctgcagtcagtctgctgatttcagccccagctttgacacccacttctgcggtgtgaccatgggcaaagttatatgacctctctaatttcagtttctgcacttataaagtgagactgatagtggtgtctatctaacgaggacactgtgacaattaaatgagctaatacatgcagagttcagagtagaatgcctagcgagagtaagccctgagttagtggaagatactcttttccgtttgggtcatgtccacatatatttacctgtctttctcccaggctatactgtgagttccaagacatgtaagctatgccttttcttttcttttcttttcttttcttttcttttcttctcttctcttttcttttttctttcttttccttttgttttttttgagatagggtcttactgcatgtctctgtgtagccttgagcggccaagttcaagtgatcctccaacctcagcctcttgagtagctgggaccacagatgtgtgccaccaacgctggctaattttttaaattttttgtagagaagagggtctcatgctgccaggctggtctcaaactccgggctcaagtgatcttcctgcctcagactcccaaattgctgggattacaggtgtgagccaccatgcccagccaactatgattttatataacatcattattatgtttgtataacaccttccacttttaatgttcaaaatagcatcattgtaattggaaggaatacctttttgtcctgattttactaaggaagcttagaaagtttctctgtaatagtgattttcaaccagactgggggacttagtgacagagcttgctgggaggattttgtcaccctacacatacccagtagagagtctgaatcactgctgcatgaagtcactcttgcaaatggggtggtggagaagggagggattgtattccacagattgagaacaccctgtttggtggtattttatactggtgtgcaccaaacaaaccttttctctcaactcgaactatcccatccaaaatagatggggaagtcattctataggtggtgccatgctctgtgtgttcccttcagatttctgtaaccaccaagacaattcctgtgctctgcacacagcgagccttcaaacatattgctttgtttgtttgtttttgagatggagtctcagtctgttgcccagactggagtgcagtagcacaatctcagctcactgcaaccttcacctcctaggttcaaacgattctcatgcccgcctcagcctcctgagtatttgggattacaggcatgtgccaccatgcccggctaattttttgtatttttagtagagacagcgtttcaccatgttggccaggcagatctccaactcctggcctcaagtgattcacctgcctaggcctcccaaaatgctgggattagaggcatgagccaccataccaggcccatggtgcttttttgaatacaagaccagagagagctggagccgtgagctccctcctttatccagccttgcatttctatgccttaaggtacccatcatgggcaaagcacatggaagatttgagacaaagtcaagcaaatggttccaagttactccaaaagagaaattgtaggtggtagtagggctgctgccacaagttaggcacaggcccagctccttctaatccaggaaagaaagtggttggaactgaggagaaacaagttttaaggcattcaaggaaggacagcctagcttagttagacatgatctatatgaagaagggacacagaaggctgagggaaactggggtcccttttctccaggaattcctctggagtaccagtttgagaaactcttgtctggaatgtcatggggaaagttggggtgactagggaaagagataacagtatttaggttataagtagtcataatcagtggtgaagaggcatggtttatgggcaagatagagatagaacttttaggccaatcaatatactgtaacttttttttacattttgttagatttttgtggccaagtagagaaagaagtcttcacagcatagctgtttctaaacactttgccagttacctgtgggttgaggcaaggtttcattccttgaatccctaacatggagtgtagtgcctggtgcccagtgagtgatcattaggtacttgttgaatcaataaatgggtgtgttttaaagcatcttggggactggcaaaatatgtgcttaaatagtaaatattgggtacagaatagacgatatatttctttataacaaattctatcttactatccagttgtttttccccaggctggcatttgtcgtgttgtcttattactgttgtcatgatgggagactacgttaatgagaacaagttagaaattaaaaggcctagttctagtgcaactacctgtttggggaaaggtttttaatctctatgagcattggtttcctggcctattaaagaaggataataataataaacctgcccagagtaccttacatctcaggtactagtgatgatcaaatgaaataaaacataacaaagccttggaactagaaccatccctttgccctttgcaagtgtctgttatagcagcctgtgaacagtgttttttttcaaaggcaagaatttacagtccagcaatattttgaagtaattagtaatcatttgcaacaacaatgccagctcatcagtcttctgtagtgaacaagcaagagtgcaagtcctcattaccaagtacattaggctctgcaaggcgctgctgattagtgaagagttcttcagaattcagtggtatcaaatggattcatacttaggatcacagcaacctaaaatgccaccgggcacttggggaaattgtcagtgtttcttagattcaggaaagttttcttccataaattatcatagcatttggcaattttctaatccagttatttaagtatcctatcactatcagcattaagagatgatgttttgtgtcataacatgaagagggagatttaaaaaaagagataatgttttgaaagggggcagggtggcgaggaagtgaccttttcttcttggtgttctggagtgatggttcttaatttgttgaattatgatcccccctcctctccccaatggcctcatgcagaaacacaaaagcaatttgcactctgcttcccagagttcagagaaccactaaatcctgtgacattgaggctacctggtctggtatattacaattgaattttgctttgagtcaatttgtatgtggtcatgaaggatgttcagtaagtcagagctctgttggttttggcttgtgaggtaaagtcgatcccattatctacagccattgatttgagagtctgatcttggaaattcaaattttaatctattaaatttttggaaggatgtattattggttgtatagtctaagtgaaaatgcactgtgaactgttaagaagggcactctaggaaatgtttataaagctgggtgttgagtagataattgaaaaactattatttaaacatatgagctagtatcaggataaatagctaatgcatgccaggcttaataactaggtgatgggttgataagtgcagcaaaccaccatggcacacatttacctatataacaaacctgcacatcctgcacatgtatcccagaacttaaaattttacaaattatgaaataggtacagataacccaaaataaaccatttctataaattgtgcatagtaaatggcatttctttggagcatttgtgtattttttttataatcttatgaatatgtcaaaattctctcatgaaggccgaggcgggctgatcacgaggtcaggagatcgagaccatcctggctaacgcagtgaaaccccgtctctactaaaaaatacaaaaaaaattagctgggcatggtggcaggtgcctgtattcccagctactcgggaggctgaggcaggagaatagcatgaacccgcgaggtggagcttacagtgagccgagatcgcaccactgcactccagcctgggtgacagagcgagactccgtctcaaaaaaaaaaaaaaaaaaaaattatctcatgagttgatgtttggggccatagctacaactcatcatatatctgatgatgttatttcaggcaacttttctcatttgtcagatggagataataatacttactttacagacatgctatgggcattaagtcaaatttcatatatttagtgattttttaaaaatagatacatacaaaagtaagttatgagatgtaatagaaggtgctaagtgctatgagaacaaatcaagcaggctaaggaggatgggggacacaagggagtttaaaaaggcatccaagtaggggccgggcacagtggctcatgcctgtaatcccagcactttaggaagccaaagccagggatagcttgaggccagaagttcgagcccagtctggctatcgtggcaaaaccctgtctctactaaaaacttaaaaattagccaggtgcagtggtgcacacctgtaatcccagctactcagtaggctgagacacaagaatcacttgaacccaggaggcagacatcgcaccactgtactccagcctgggcatctgagtaggactctgagtatacaaagtacttgaaacctatcaggtattcaataaaagttagtatgcatgtatatggatggaatttgcccttgccatgtgcaaatccaagtccatacaatatatggaatatggggccaggcacggtggctcacgcctgtaatcccagcactttgggaggctgaggtgggcggatcatgaggtcaggagatcgagaccatcctggctaacacggtgaaaccccatctctactaaaaatacaaaaaattagttgggcgtggtggcgggcgcctgtagtccagctactcgggaggctgaggcaggagaatggcgtgaacctgggaggcggagcttgcagtgagccgagatcgtgccactgcactccagcctgggtgacagagcaagactccatctcaataaaaaaaaataaaaataaaaataaaaacatatggaatatggatggttaaactatacttacgatataggcatatgcgagacagggttgcagtgtctctaaaaggacaattataaaaccacgttctcttcctttttgtaaacaataacaatggaaattacaactaatatttgttgagtgcctactttatatacattaattaacctcattgtatatattacatttattatattaaattattccttgtagaaaccttgtcaaataaaactgttattatgctcatttttaagatgaaaaaagtgagaagtaactccagaagacgaaaagaagctgagtaactagcccaagattaagagctaggaaggagccaagcaaactttaaacccaggttgtcagcccctaacctgacttttaacatagggaaccatgagacttcctgcttttttgtttgtgtgaggacatctagtttgctaaggtgtcatacatttacctagcatttcttgttctgtctctgcttacttgaacagtttttcacagggcgagcaccaggctgccccagagcctgcctttgatggcagattaggagaatccaaggattaacaagcatgtcctcatagctcaccaagttgtatggagttctcaagtcctccctgtctctctccacagaagctgtggcacaggggaaccttgattttggcaggtttttgatgttgagggagccctgagtctctggaaatgctgtctgctgagccaaaagcatttttcgtgattatttccattgcaattagcccaccttagcacatagagtaaaagctgaggagatttcaaacactcctgaaatataaccatcagaatacactgaattatcaccttatcgctcataatatttgctggcagaatcttgctggaacacttaaaataaatccttaacatgctggttgggaagagaatggtagcaaatggggccagctcactcgtggcacagtaaatctgccatgaattgctgagatgaggaagaagttagagagagtggcagtatatatatatatattttgaactttcccaaatcctgtggaaaaaaaattaaacaagtgaagctaaatcttcagattaaattttaccaaaacattctctccacagtaacaggtggacaggttagacaatttcctaattcatttccattttaattgttagtattttaacaaatgactcatttctaacagctcttttggcagaatcagtgattctggaccgtttttactttttagttgataagtgcttgaatcattgcaaccttagtgagctctggctgggttctatgcccaacttcttcttgggttcttggaagggtcattgcatttactggatttaaccagtgatctactgtggatttcatttgcacacctcagtgaaagttacatagactttaaaacacggtaatataaaaatactttcaagaagaatttacataaaaacctaatattctaggaaatataaaaacaatgtcaagttgggaatccattctgtttatcagaggaagaactcatagctactacttatttatgcacttacaccctctatctctggccctacagttctgactgttttaaactcatctggaccctctcttaacccctaccatcctataaagtgctaagccacactaggaaagaataaaagggtggataatgggctgcgtaaactggaaaattccactctaatggaaagtaccatgagaaagtgaaagatatcatcattcgtctacatttctataattgtgtggtatcagaagtctaagccaacgtaagaactttacctttagacttaaaatcatgtgaattttaacttaactctgagatccagaacacaagcgttttccttttagatcttcccttcatagtttatgtccagtttttttaaattagttgccaatatataataactggagagtggcattttaaaacatccagatttacagcctttcttgaactattagaagatccacattcttgcacctgtcaacttgagccaggtgtgtgctgtcctcctcgaatggagtttgtaccttcactcatcagggtctacactttctgcataaaattttccccatttgatgaaagtgaagctcatgttttcagtcccagttatgcttttacagttgtatattcatgggattgttccacagaaatacgcttatcctctttccagatgagtcatgtactactcatataacacagattcccagaagtgtgccctcatttgcatttcctgtctggcctagacctggctctatttacataacataattgaaaaattgctattttaagggttaatttggttaactcctgttgagattaatgtcctgcaagctctctccagtataacacagtagtaaagagcccttgagtgatttgcttataaaatgaataacaatgactttttacagtatggtgaaaattaactgggaaaatgaatgcaaaatgcttagtgcagtgcctggaatatattgtccgtgttcagttaatagcattagcattatgcgtttctgtctacactgaaaacagtaactggacatcacttgatgaaagctaagacttttgaaaatttttgctttttaacttgattctctcaaaatatcatcctaatcagaatcaccactgtagtaaatgttatttattcaatcactcaaaaaaatatttactgaataccacagtaaccaataggtaactttttgtcttagaagagtgcacactctagcagggagatggagaataaactactagagctacatataagttcagatagagataagagccagtaagcaaaaaaaaaaaaaacaaaaacaaaacagaggcagggacaagggtaatgggtgatgcaggctggaggtgctattttttttagctgagatattcaggataaatctctctgacaaggttacagatgagatattgtcatcaattagaggtgatttataaactttgttcaatgtcaactgttggactatttattcttgtgtttcatttgggactttttgtttttgctaaacatttctgtaaatattgaggatgttagggtagctgagtttaatgaacttggtttgaaactggagaaaagaatattttatgaaagcgctgatagttgcaggagagccaagttcaggaaaagaccaactgaagattcaagaaaatagagtgattgatgactgaagttaaggaggaaatgagtggccctggaggacaggcaaagagataagctgtggacagcagaagatctatatgttccagctcatcctttcctgcaggaaagacaaactaatgatatcatgaagtcagcactttttccttactctctgcacatacttgagtcaagtgaggctcttttttttgcaatctcaattatattttacaatattacattcacatggttctcataaatatgcttattccttttccccgtgactcatatattactcagaagttactggcttcctttaactttgattgaatctccaaactctcttgaggatatctcttcgacagtggtgttgaccctaacaaagttgcagctcatgttatccgcagggtcctgggagtaagcgccatttccagactagacgtgctcaattctgttctggtcagttctgcagacatatctcaggtattgtgctctgtgaaaaaggagcaaaggtgaagaggacacctgtccctaaagattaatcatagctaccgggactggccttcccagcaagagcaccaccctattttgcacactggggaggcctcagatgtcttcagtttggcctcttgatggctctcaatcatggaactgcaaagtccactgtttaccaagacaaggctagggagaactagagcaaactgcagagaaaatgcccagctctaggccatagctgtggctctgatgcagccagttgttgctgcatggaaaggaaggcttagctttgcttaaaacatctgatttttgaaagaaggggcaaaaatctgaactcataaaatctctttatttgtgaatattggaaattaattagctttttttaaccctaataaagattgtaattaagggagatgcgaaacctgttaacaagctgtgtgactttgaacaagctgtttttcctgtatgggttcattatcaggaaaattgggtcccactgactatgaggtcccatctaggcctaagattcaatgtttgatagttggaaggcaagacagaattgctatgacttgacaatgtccataggtaagaggactgtgtccaccttgccaaacccctttaaggtaggaacagaccatgtgtcatgtctacctctctggatcatcagtaaacacatcaataaggagcagacatttctagcattcaacagacatttatcaagagctttcactgtgccaagccctgtgccagtcaccatccatcaggcctctttatgtggataaggagatttattatttctagctgtgacattcaggcacccagcccagcactgggctcagaactggggctcagtaattgttggttttcttctcctccttccctgaagctgctcccatggagaattcttccagaactcattttgcttgacttcttcccttggcctaggatatgtttatctttctttagcaattttaactactctcaaaaaccagctcaagtctatcctgttttattcctgcccgcaaactctgaattctgcttgctcacattcatttaaatattaattgagcatctactatgttcctggtactgttcacaagatggacaaaagtcctgcttttaagaactaaaattctacagggctggaggcaagtaggaaacaaactatgaaccagtaataagtgagaaattgattaaatggtattacctggaaaataagggtgatatggtagtgatttcagacctactttagattgagtggccaggaaaagcccctctcaggaggcaatacatattctgtgacctattgataagaagaaagcagccttgaaagatctggaggaagacagcattccaggtggagggaactgcaaattcaaattctctgagggaggaatacaattgcctttaggaggaatatataagaagtcagtgtgtctggagcataaattagaggcagaggggagacgtactaggtgagaccagaccagagaatttggtcaggtataaaaagaaaacagggaagtattcttcccccattctcccaattggagtaaaattttctagaaggaactaggactattctccctctctctctctttttttttttttttttttttggcttccatatacccaattacttagttactatttagttaattgactgaatgtgaggaactcactaatcatttagtatttagtgtagcaaagtagggttacatttcagtggtttgacttgggaatattcagaaggtttgggctacacataacagcctaggaggtttgaacagccctttcttgatggctagttcggcagtacccatctgaggacaaagtttcattccttgcttcttcattcatctgtgtgctgtttcattgcatgttattttgacccagtagccaacagccctctaatatggtttaggggataaagaagcaggcagagggacacttccacaagtctttgtaattgaacaaccaccaccagaagatggtttttctccactaagtctggcattttaatgagagaagttctttttgtttcctatctctgataactgactactcctccccaatcccccttcatcctttgcctgagggagattaaaggtggctggaatgcaggctggagtcattaagtgttctctcccttaaaacgaaacacatgacatgcaccagtcctttctgcagagtagtggaccgtgatgtgacttgctccacttgaccttttgatttatagagttgaagaaaaggacattgcagagaggagtgatgaatgaagatatttagttctacctcctttttgaatttctgggaaaaaaattatttcagtagaaaggaggaggtaacttcaataattatattatttctacacattttagacattgggagttacttgtgttagaattgattacagatctgtctggcataggcattacggctcctaagtctagattttcttcttaatgcaccgtcacattgatttattaatttgttctcttcctatctcctgaacttttgttaatacatgcatttttagttccttgcattaaactattattcactcttttttctcatgtattcaaatcatgcataattttgtccaaagaacaattttctggaataatagtgcttttcattcatataataaatgcgtgtgagtatttgtttattacaaaagcagtgcttggaaataggatctaagtttgttccttttatttgtggatgaagatctgtcatccataaataaaacttggaataaaagcactgcaattagaatcaaataattattgaagattcctggaaacctgcgggtgagtgtgcacatgtgtatctgttttgctcatgaaatgactttttaaaaaactgcagtatggcacagtggctcaaacctatattcccaccactctgggaggccgaggcaggaggatctcttgagatcaggagtttgagaccaacctgggcaacatagctagaccccatctctacaaaaaataaaaaattagctgggtatagtggcacataactgtactcctagccatttgggaagctgaagcaggaagattacttgagtccaagagtttgaggttacagtgagctatgatcacacaactgcactctagcctgggcaacagagtgagatcctgtctcaaaacaaaaaaaaaaaaaaaagaaaaaagaaaagaaaagaaattgatttcactgatatatgcctgataaaatgccagttataaaactgctaaatgcttgattctgggatgattgattttgcatatgtaactcttattcctttgtttcttacctttgtttttgtttgttttttctgatgctttaaatagataatttttaaagggattggtatatttctacagctgttttttctttaatcacaagtattttaaacagagtatattaattttcaaactgcagacaaaactacctattgcaagttattccaacctccttattcatctccagagatgtgtgttggtgtcatagtttcagaacacccccctggagtaatgtgtcaatgtcaaatgcacaactgtaagctcatcaactttaaaggtcttgttcttctgctaatcaaaccccacagagttcattacattttcaaaatcctccaagcccttattatgcatgacagcagaaatgaacatagtcaagttcatctagctaagaatattatcattcagtggagcccctcagagaaggagaaaaaagtaatcatttcataatcaattgtgagttttgcatgcttcacatttatatattcaagaacatatgaaataatgaagaaatatctcatcattgtgtttcttcaggctacactgagcacagtttgatcgtcaagaaataaagtggctttcctaatgtgatttgggcttataaaaatcagcatgctttcatcattaagggacagcaccttttatgtcttagctgtaaagtgtgcaggtgtcaagaacacacgtatgaagtcctgaaggcattattattgcacatgatttattcttttgtatcttttcttatttctattggcctcatttgcatctagggccatttgcaaaagttaaggaaggggagcaggataggatgtgtgaattcaactattcgaattctcctggattacaagattttgagggaaatgtgagtaggaagctatgaactcagtgggaaaaacagcacccgaagcaaaagttcccccaggcatccaatgccaggggagttatgactgctttctattagggataaaccaggcctcctgggggctcagtaaagtggtcattcccaccttagaatcagtcatattagtaaaagcaacctccaaggtaactgtcatgtgcccctgcctagacagtgtatcgctgggttttggatggtaggggctgaggacctgagggatgggagagaaaatgcagttggaaacagcttccctaaccactttccctcctcccctccctcagcctgttgagtccttgacctcatggtcccaacaacagacatccaacaccagattccggccaggcacagtggttcacgtctgtaatcccagcaatttgggaggccgaggcaggcagatcacctgacatcaggagttcgagaccagccttgccaacctggtgaaaccccatctctactaaaattataaaaattagccaggcgtgctggtgcacgcctgtagtcccagctactcgggaggctgaaaggcggaggttgcagtgagccgagatcatgccacggcactccagcctgggcaacagaacgagactccatctcaaaaaaaaaaaaaaaaaaaaaagccagattccctccaaagtcaagggtctcctgtcaaaactgggtctctaaacttttcttttatcctttgtcttatctgttatcttggctgataaaggaaagtagaatatgttctaatgaagatcacaggaaatattgaatacagtcaatctagattaattggctgcttaaaagcttccttgtagattagatcatttgccctcttacaggctcaatgagctgctttttccatgtgttcctttgaataatgtctgtgtcatggccttagtttgaaagaagggagaaaacaagaaaaagggcacattttgttactacaagttttcaggagtcacatcagtgatataaatgctgttgtcacattttcttttttaaaaagcatttcatagttttactgaatattgaacagagcaaattatatagaatccaggtcctggggctcagcgtttcatgtgtgacacacaaagagtggctagagaggatattaatgctttaaattattacatgaaaagatagtagggtttttttggtcatataaagctaatgggtaagtggactcttctggggcatgtgtggtttctaccattttttcaatctcaggatcacacaacattctaggttcatgggagtccacagcctttcatttaaaagtacatcataggccaagcatagaagcttgtgtctataatcccagcactttgggaggccaaggcaggaggattgcttgagctcaagagtttgagaccagcctgggcaacttagcaagacctcatctctactaaaaattaaaaaaaaaaaaaatagccaggcatagtggcacacacctgtattcccagctacttaggaggctgaggtgggagagttgcttgagccctggaggatgaggctgtggtgagctatgatcatgccattgcgctctggcctgggtgacagactgggactctgtctctataaaaaaataacaaaaagtttacaactatatcatgaggccacgactgccaaactcctggttctagatcagtggtcagaaaactttctctgaaaaggtgagtaatattttaggttttgttggccaaacagtctctgacaactgctaattctgtcattgtagtatgacagcagtcatagacaatttgtaaacaaatgaccattgctgtgtttcaatagaactttatttgtgaacactgaaatttgaatggcatatgattttcacatgttagaatatttttcgtcttttgatttttttcaaccatttaaaaatgtaaaagctgggcagagcatagtggctcatgcctaaatcccagctctctgggagcctgaggcgggtagatcgcttgaggccagaagtttgagaccagtctaggcaacatagaccctgtctatacaaaaaatttcaaaaattagatggatgtggtagctcacacctactactcgggaggccagggcaggaggaccattcataaataccctaagtctttatgcttgttcacggaatacagttatgaattctagacacagcaatatcaactcacaatatgccatcatgcaatcactctgggcttttgtttcttcatctcaaaaatgatgaggttcaacacttttacactgctggtgggaatgtaaattaatacaaccactatggaaaacagtatggagattccttaaagaactaaaagtagaactatcattcaatccaacgatcccactactgggtatctacccaaaggaaaagaaggcattatatgaaaaagacatgcacacacgtgtttatatcagcacgattcacaattgcaaagatatggaaccaacctaaatgtccatcggccaacaagtggataaagatagatatatatatatatatatatatatatgcacatacaccgtggaatactactcagccataaaaagaagtgaaatgatgtcttttgcagcaacttggatgaaggtagaggccattattgtaagtgaagtaactcaagaatggaaaaccaagtatcaaatgttctcacttataagtgagagctaagctatgatggacacaaaggcataagggtgatataatgggctttggggactcaacggggaaggttgagagggagtgagagaggaaagactacaaattgggtacactgcatactgcttggctgacgggtgcaccaaaatctcagaaaccacctctaaatagcttatcaatgtaaccaaaaaccacctttactccaaaaaccattgaaataattaaaaaggaaggggttcagttaaatgggctctgaggttatgtgatttcttcagtttattttctgtgaaaaaaaaatgtatttttacatattgactttccttgaggcagggcgtattattgtcatcaaatgagatggaaaatgttaacgccatatccgactgtgaaagcggcactttcagtccatccaccagagtcccagctcaggctccaccagcctccccatctgcctgggctcaccctttggggattcagcttctgcctccgtctccttttgctgctgcagtatctttgagatgagtgacagtagtttgagaaacaaaatgtcctggccagggggtgggttgaaagacacaattatgggaattattagtcttcttatttcgtataattgtagagtgtttttctctcaagagcaccacagaaagtttgaatgagtagggattatttatcctggagtggggaagactgtggggagggaaatgactcagtaacagcatggagtgtttaaaaagacgataaccaactgctgtctcttctcactaaagacagagattaaaaaattgagagcagagggctaaattaaatgtgcagagtaatatcttgccagtaagcatgattaaactcccaagtgagttcctaggggaggtctcggtggataggaggacacgaatgtcctgcctagagccagacatcttattttctggtttttgttgctggaactaaggtctgcctacaagatctgagggacagacccccaggcctggactcctggccctcagcattttgataaagcaaaggtgctccacacagacataaagaacagaccaaaaaacgcagcaattttcatcagaacaaaatctgcagcttcagggaagttagctgagcttggggtgtgtcctggaagtttatggaagagtttgatctgaattgggtgaagccgggcatggggatagtgaagactttttaagccagcctcaccttctccagagcatcaactcatggcaattcttccctttctgactatctcccccacccactgtgcctgccacaggcagatcagatttgctattttccagagaggactggctccacctcactgtatgtcaattgagaaacaggcacagagcaagcagggtgatggttttccaggcctccctgctaaagcatagtttccagcacatactaagtgcctaccctgtgcatggtgattgtatacataaatgaatgaagcaggggtgggaaagaggagaggggcagtgaataatgaacaacctgtaactggaactctagattttgatgtgcagtctctcaattttcaaacagtggcaaataatttcaatattttttccatctttataaaggtaaaaattaacaaaaattgtatatatttaaagtatataactcaattttttctttttttcgagacagagcctcactctgtcacccaggctagagtgtgatggcataatcttggctcactgcaacctccgcctctggggttcaagtgatgcttctgcctcagcctcctgagtagctgggattacaagtgcgcgccaccacacccagctaatttttgtatttttagtagagacagggtttcgctatgttggcaaggctggtcttgaactcctggcctcaggtgatacacccacctcagcctcccaaagtgctgggattacaagcatgagccaccacccccagccaatgttttgataacatatacattgtaaaataatcacagtcaagctaattaatatctgtcaccttttatagttatttttttgctgtgtgtgtgtgtgtgtgtgtgttatgaacaattaagatctaccctttcagcaaatttcaagtataataaagcatggttaactatattcacattactgtgtattaagtctccagaactcattcatttttcataactgaaactttgtaccccttgaccaacatcttctcattttctcttctactcctagcccttctactctctgtttctatagacttgacttttttcaattcctcatgtaaatgggatcatgcaatgtttttctttctgtgtccggctaatttcacttagcataatgtcctccatgttcatccatgtggtcacaaatggcaggatttatctctctttatgatcaaatagtgtttaattatacacacacacacacacacacacacacacacacatatatacaccacattttattcattagtcaacagacaatttagttcttttctgtgtcttggctattatgaataatgctgcaccaaacacaggagtgcaaatatctctttgaggtattgattttatttctttggcaatatacccagtagtggggtgctgaatcataaggtagttctgtttttaatttttcattgaactcccatactgttttccttaatggctgtaccaatttacattccaatcaacagtgtaccagggttctcttttctctgcatcctcaccaacacttattatctgttgtttttttaataatagctattctaagtggtgtgaggtcatagctcattgtggttttgatttgcatttccctgataattagtgatgtcaaccaccatttcctatatctgctggtcatttgtaaggccagacttacacaccagccttcctgaagtcaacttttgaaaaatgtctattcaggttctttgcccattttttaaattgggttgtttgatttcttactattgagttgtatgaattcattatattttttggatattaacctcttattacatgtatcgttcacaaatattttttctgaatcctaagttgctggttcatttcgttgattgttttctttactatgaagaagctttttagtttgatgtagtctcatttaataattttcgcttttgtggcctgagcttttgacatcatatgcaaaaaatcattgcccagatcaatgttatgagaacttttgccttgtgttttcttctatagtttcatggtttggggtcttacatttaagcctgtaatccattttgagttaacttttgtatacagtgttagataaaatctgatttcatttttctgcatgtggatatcctggtttcccagcaccatttactgaggagactattctttgcccattgtgcattcttggcacccttgccgaagttcgattgactagacacacagatttttttccgggccttctattctgtcccattgttctaaattgtctgggtttttttttttgttgtttgtttttgtttttttggccaataccagattgttttgattacatagctttgtaatatatttttaagccaggtagtctgatagctctagctttgttgtttttgctcaaaattgttttgctaattcaaatttattttaaaatactatggtagtcaagaagacatacgtttactatttgctgccagcgtgtggccttatctttagaatcatgtagaattagatataaatactgcctatttactggttgctgaccttggcaagttcttgatctctctgaactctagcttctttctcacaaacagagaaattgcttcacaacatagctgtgagaactaaaataatgtatgtaaagaaattaatatagtgccttgcatgtttgataaatgttattataatatctgatattataataatgaatagctgatataatatatcatgttgatccacataaaattgctggtatacgcttggttttaaactataaaaatggcaatttcatatggttcaacataatattttgtataaaatcctccccatctacattattgtgacattattgccactattaaagcctatatacccatttcctaaacacacacttatgattcccccttccatgctctatttattcccatagtatttatcactttgaacatattcaacaagttatttattatgtttatggtttgtcatctgtcttcccacatttgctggtgtatataagtttcataaaaaatagggattttctcagttttattcattgtttttcctcccccactgtaccccagtacctagaataatgtctggcacttagtagtctctgtgtaaattatgtgttgagtgaatagacttacacactgatctttctgaagcttaattgagcctaccatggtcatgttccttcaagccttaaaggtttaagagaactattgattagaactgtactaaataaaatataaatgaaggttgttataatgatgggttctttagggctctgattcttgtgtaagaacagtagaaagttatctgaagtgtgagaacagtaaaaagttgcctaaagtgttgcatatctgaaaagctgaattgtattagttgaaaaaagctaagtaaaaaatatttatctgggccgggtacagtggctcatgcctgtaatcccagcactttgggagactgaggtgggcagatcatttgagctcagaagtttgagaccagcctggccaaccaacatggtgaaaccccgtccttactaaaaatacaaaaattagccagacatggtggtgggccctgtagtcccagcttctcaggaggctaaggcaagagaattgcctgaaccagggaagcacagattgcagtgagccgagatcctgccactgcactccagcctgggtgacagagtgagactctgtctcaaaaaaaaaaaaaaaaaatgtatattgtgtgtgtgtgtgtatgtatgtatgtgtgtgtgtgtgtatctgtgcgtgcatgtgtgtgtatatatatgtatatatacacacgtgtgtgtatgtgtgtatatatgtatgtgtgtgtatatgtgtgcgtgtgtatatgtgtgcgtgcatgtgtgtgtgtatatgtatatatactttatatatacatacatacatatatagtatatatatacacacacatagattatatatagtgtgtatatatatatacacacacagatacatatatatatatatatatatatcggaagtattcaatgagttgtttggtttttttctcccacccggttatacacatgagtttggcatagtgctgtatttttaaaaagatgatcatcagttgcatttgccctttgacaaaaggaaattggtttagtaaagtaactctcctcggcagtaaagtatgccctcagagtgtgcatgtgtgtctgtgtgagtgtgtatataactgtaggtatacatgtctacgcagacatatattcattagaaaagctaatacagagaaggaaattaaaagtttaaaaagcccaataataaaagtcaagcctgactggattccagaaagacagaggagaaaatggtggtattgtctttagaaggaatgtcagagtagcgtgagtacagaggaaagtgctgataagcagaatgacaaaagctggtctcatgagtaattccaagcagccagaaagccagggtacaatccccagctgattgccctgctattctcggtattccacatatcatgactaaatccacagagccaatatggtaagtcgtggggaattctgggaggtactatgctgtttataagggcccaggcggattctgtactcttgtctgccccgcccaccctccatttaaatactctagttagttgcttctgaccagctcctacctccttcctaggaagtgggggaaacctttacatttccgaaggcagatatttttagatgtgatgctctgtccaaagtgttaactaattgagttatcaggtttcttacttggccacagagaatggcagtggaagagggagagagcttcccagaacaagtaagcatttacagctcctaaatgaaatgtactttccttatagaagttctgttttgccctgaatagttgtgccttttaaaaaatgtttgttgctgggtaggaagcaaattaacctgtttgcactacggatcacttgagttaaatatgtgtaggacaatggactgtcctttctgttttgttccgatccggactctagatatgttttgcctgtgatgtaatttggagtgagttcagctaaggcctgccttaagaggatgcataacaaaatacaaaaagacagggggcgattaggagtgcaggaaaagcctggtaaatccaagagcgtaaaaaggtttatatggttgcacttttttcaagagaaatccaacagctttaaaattcagctttttctgatgtattaattacaaggggcaatatgaaattttacagttggggagaaaacatagaattaaaatttatttttgaaactcatataaatggtagatgaaggatgtaattagaagttggaaaatgtaattttatttccatcttaatagaattgcacatagatataaataagtcatcttgtttaataattttaaagaattggcatagtaagccatctcccccttaagggatactgtgtagataaagggagtaaatatttgctttatgtttgtgaaattttgaagtatttgattctgagggattcacctaatgctatgtagatcatggtatggttgaaaatggtcatgtgatctcttgtttctacctatatcctttcatctaactgtgtgatgttacacagttaacatcagtgtatctaactctgagaacaccttagattcctgaatattgtgtttaaacatttagtgaaatagtcataatgactagaacgagacatcataaaaatgaggacattgttgcttgttctaatatcaggtggacaaacatgctaatggttttgagaaaacagctgtcatttcacagtgttacaaaaagcaatttggaaaacttacaatttttatctttattttaaatggattcagttttcatctttgtactcttaaagacagaatattttttgcgaaaatattaacctttcgtgacctttatggaatgtggcaatattgcatatgtacaattatgaaattttaatcaagtgagattttataaacattctgtgtgtctcagagaaagagtttttaagggtaatctttgagattcgtaataaagctataagattgtgcatgaatgccagacattaatgtcaactgtaatttactagtaatataagcatattggcaagtgagtcctaaaaatcgtatcactctaaaaataatcaacttacccatccaaaactttcaaactgtactgttaaattttgatgtgtattctgttccattagttgtggatttgaaaactttgcatatgcatgatcataaattacatagttagacagctttgagaaatactcattgctgggaagggtttgagcaataaggcttgctgtaacgagtcttaaagaatgtacctgaagagttctggccttttattaattaataacttaaaaaatctgagatccaaaaggaaagcctaaataaaagtagaccatcttgtttctgcctcctgtcagaatatatcaactaaatggtgaaagcatttgatctcagcccatatgtgcagtgttttctgttttggtgggcatgctgtttgaaaaaacgtgtaataaaatgacagactgaatttgaaattatcatgccgtaagcagtaactctggaagggtactgacccgatacgaatcatatagaagttccatcacaacagagtagcatatactattgctgtactgggttttgctggaaaatgtagaattattcctctcctgccttcatctctgacttgaatggaagactgaacactttatctgcatgagctgaactatggacaaaatccttgcaaagagggtatagtagataattgcattttcatgaatgatcattaatacttcctgctgcttctgttcggcttgtggtttttacagtattgtttagagattttctgtatggaagaactagaactagttttgacataaatgattgatgaaaagttaactttaaagtttaactcttcaataatgctcatgaaaaaaacctagactctaatattgaacaaagcccaaatgtaatccaattttagtgtgcattttagaggtagctaataataagatcattcaacagcaactgatgtgcattaattttaaatcctgtgaagttaccctataatgccaaatagaaaatctttgaatttggatgtttcctatgttatatatatatttttcaatgattgatccagtaataaatacatatttaactgttggaggaatccctcattttattgttgattttcacttaagaaaattgggggcaagtaggatattttatatagtcaaactcaaaaaaagaaatcacaaaacttgtcttttgctgctgagactattatagtgtttgttttgaaatggaaacttttagttatgtagtaaatataatatttacttaccaactaaatttgttctgtgtgacaatataaagatgctacctcaggtcggttataaatttggatgataatcaaatttaagttatctgtaagaccaaaaagaatttacaatataatgagatatcttttcgaagtcattctctttataatgttaagacatttttagtcgcaaagtaaatacgtttgccaattctatcctaatgcaaatgtttattttttaaatgttttatcatgatcctcagaatatattgcaaaacctagtaataaaaattaaactgtgtcttctaattggactgttgataaatatataattagataatataacataaatttcagtgtatttcagggaaatattcatagttactaataatcactcgttaagcataagactctgtaaggaatttaattcttttattttaggagtctctttttacttttgtaagtaagatttttgtaagaatatctttgtagatattcatgatcgcaaacatttccagagaataatgttgggtagtgaatgccatttttttctttagtcaagtgacggtgagtgatggcaaccagtttgaaaagtagaagccaataatgtaaaaatcgcttttcagaatctggatatgtttcagctttatttagtcttgaattattgattattttgtattctaactcaacatcattttgatatattgtaaatttacatacttctgtaattcagtgattattgtcatattttgaaaacacttgtatctgtaagatcagatacattttgaacactgcatacttttttatttatttatttatttctttgagacaaggtctcactccgttgcccaggctggagtgcggtagcacaatcacagctcactgcagccttgaactcccaggttcaagcgatcctcccacctcagcctcctgagtaactgggactacaggtgtagaccaccacacccagctaatttttaaaatattttttgtagagacagggccccactatgttcagcccaagctgatctcagactcttaggctctcatctcagcctcccaaagtgctgggatttacaggcatgacccactgcacctagccctactgtagacttttaaacacagactgtgacttgctcattatttgatccccaaaacctggaatataatatgtattcaataaatatttgttaagattttaagcaaaacttcatctttgaagggtacagcctctcataatcatggccttctagttaccagttagtcctaacaagagactattttaaaatatttaaatatttttaaaaatgtttgaaaggaacatgctctaattaactttccattttagtgaccagaatcaggctgtcattttccatgtagaagtttcccagaacagaggatttgtatctgtagttgtgtttatgcaacaatgacaagttgtccttaaggaattctcatgctatctttttggcagcatcacttgcaatggaatttgttgcttatttgtcacatgtcatttctaaggaccttaagtggacatcctatggacagtgtcatccactggggaagtgtattagtgttcaagtatttcgactgtgtggacatagccacttggaaagactctaggagaactaaagcaaggtagcagaaaagcaatgaataggtactgattagagtgatcctgatctgtactttgcaaaaatagtagcactatatttatttagactttgcttcctgctcagtcttgccttttgcttaaatgttctcttcggaggtgttaggcctttgtatcatgaggtcaatcaagaacccctgggtgtccctgagacccttctagagtaccctgaagactggtatccttgacctacttcaaccaaaacaatacgtacattaaagagatttgcagactcgtaaaacaataccattcatctcatcttttttatttgttttggaaaataccgttatgtttcataagataaatattttaagttagcatgtaacaagattgccattgttaatttaaaataaattaatgattaatttttaaattgtcagctttattttctaatgtggtaaataacaatagttataatcctcataatcaaaagctctttggggttcctcaataatagttaggagtataaaggtaccttgagtaataagtttgagaaccgctgctgtagacagatcacaatgtgagtgttctctgctttgtttgcttcccttacttcctgaaagcactgggcaaatgaggtcaagttcgtgggttcagtccctgtatgtttgtttgactctcatggttataattgtagccaaacaaactagaatattaacttaaaataattttaaagtgataattaataaaggataatgttaattggggaccaactgtgtgccatgccatttctaactgctcggcatgtattatctcctttaatatcaacagccctctgagttaaattttactgctaatttcattttacagatgaggaaatttaactacagtatgtttaagtatcttggccaaagtcacatcctttgtgaattgcagagtcaggttgtgaacttaggcatcctgggtccagagtctgaactctgaaatcactaaactacattgacttgccaatagaaagtgacatattagtctagatctatctgcaaatacttagaaaacacatatcacatagctccttaaataggagtctttgctcctagtaaccctcgtagtacattttagctgttagacggtaacataacggaaagtcaccttccatgttataactacttataatgacagagtccagcggttaccttaaatttggggtaaagtccactcttccttgtttcattttttgttatagaaaataacgtccttccttattttctttactacatgtttccttcgcacttctagaaagatttcttgtgtgtctatgtatgtgctctttctatattttgcccttttgttgtatttaatgtaaagctgtttaagcctcccaattccaaatctagtcaaggaaaaatataaatgtcacttacagattatttacaatcccaaatcagtctatctatctatctgtctatctgacttctctagtgagctaaccttgtttttaaaaatattttttatacattcaaataagaacttctttagctatattttcagcaaggcctcctaaaatccctttgttgattacagacttaagtaaaaatgaaacattttaagtgaaaagaacaatagcattttggtatatttgttttttaaaaaatcagcatgaaaccatcctccctgcaagccccctacctcccaaaaaaggcacatagtttcatttaccaacaattctagcaaggctccagctgcatcagctggtggccaacattttaggatgataaattcaagaactcactagctaatgcctcctctccctctggtgccatggcctcacccttcaactcctctgggcttttaaacctcaggcctctaattatctgaccaggaagctgaagtccactgtattgtaatttcctatctgattcgcaccatatagagtatatttatgcattgcaagaaaatagttatgtttgcagtattaagtctatgcacactaaaaatcaagctgtttatttcctggtctaaaaaaaaaactgttgggaaaatgttcatctattcaaatactttctcttctctctgctacctagaccagttttagcttatcactgttttcagttgctatatataaaatgtgaatagttgcttggattaaatattttaggactcatgccaatgcctcctacataataaggatccttaagcatgaaggcctgaaatccttgttctgattcataacataccaaataaatggaaaaatcgcaaacagttgtcatgttttatataatctaccacgtataatgccagaagttactgctatgtatttcctgagcggaatatagcaatatctcagtattatgaggtacctctctaagggactcagcagtttgtgttgtggtggttgttgtgtagccaagctatgcaaaaaattggaatttgttttataaacaaggatctccgcagactgccagattttaactgcataatactatctcgtttcattttatgtttaatgggacaaagttgtcggtcatttttagccttctttgtatgtgaggagtgggtccaattcattcttgttctgtatcattaggtggtaggaagaacattaaagccagggaacccaaattctattttcagcactttctctagctagttaagcaaatcacacctctcttcgcttcagttttctatctatttgatagagatgatacggtgaccactgcttaccccaaaatataagatgtgtataacagataggattgtatgtatttttttgttcaatacaaagcaagttgtttattaagactaagagttaatcgttactctatctttgcttaccagtttactagttcagcgctatgaaccatgagattatttaatgttaaggtgagccgagggtatgtatgtaaatgactaatgctatcacaagatgataaatgaaggcgtgatgagatgaatgccagcggatccctccaggagggggatgtttaaagcagccactctctctggtaaacaaggaagaatagattatgcatcaaggatttcctaggcagcttggctcgcaggaaagcaaaagagaatttcttaacgacatgttcatgtgggaaataattgagacagatgagctagatgaagcaaagcaaaaagagaggagggggtgactgatagaaagtttaggaccctgggcggggcttggtggctcatgcctgtaatcccagcactttgggaggccaaggcaggtggatcacctgaggtcaggagttttgagaccagcctggccaacgtggtgaaaccctgtctctattaaaagtacaaaaattagtcgggcgtggttgtgggtgcctgtaattccagctactcaggaggctgaggcagaagaatcgcttgaacccgggaggtggaggttgcagtgagctgagattgcacaactgcattctggcctggcaacagagtgagactccgtcaaaaaaaaaaaaaaagaaagaaagtctaggaccccagtggctttatgttttttttgttcagcacatgccttctcccaaacaaatgaaaaatactttaggtatttttgggaaggctggcatctagaacacttacagattagaaaccattaactgctattttattaaacctttgattactatcttattttaactcaatggggaaaataattccctgaaataaacatgattacacttttccaaaggactaaatcttccttatattaacattccattagcgtgtattaagaaaaaaaaaattctccagggctgctgtatgttttgaattgcttagccctgagaatgcaatggatagacttttttttttttccagagcaagatattactatttctctcatgcttctttgtctcaagaggtaatcagaaacaggttcaaacacagaggaggtttcaaaatagtctggtaatgaatacacctgcaaaacatacttttcagaaatggtttctccatctgcggttattttccaggcttacttatttatttgaatctttagatttcagaataaccaaatataaacattttattaattttaaggttgaactgtctgttcctcttgtatagcttaacccaagtaaaggcaaactcatgctgtcctaaaatatcctaatgaaataaagttgaataattcgttttcattttaaatttgaaaaacatcttgagctgagcacagtggctcacacttgtaatcccaacacttgggaggccaagatgggtggattacttgatcacaaaaagtcaagaacagcctgggttacaaggcaaaactccgtctctactgaaaattacaaaaattagtcaggcgtggcggtctgtacctgtagacctggctactagggaggtcaaggtgggaggattgcttgagcctgggaggtggaggttgcagtgagctccagcctgggtgatagagacagactgtctgggggtaaaaaaagaaaaagaaagaaagaaatgtatcttggataaagggctatacttcttttcacatcttgggttaggtactttggccacaatagaacttttattaacactgctccgtctttgcttgtttggaaaattaaacacttaccattagcagtggaagcatttgtgcattgcataatatcatggagcttttagggcagggaggatcttgcttgtcatctagtcaaatcatcctaccagttccttacatcatttatggctttctgcctaatacagcgtagtgactttgtgtctgcagcacagtaagataccttgcaacttccatagtgtaaggaaaatgaaagttttgagtcaaaatagtttgaagtcaaaatagttggccatagcctggtgcaaatcaagacaaaatgttactatattgacctcatattattaagacacaaattctcctctcctgatacctatgattttatatcctctaagagacaagtgaaactggctttttaagatcttactttatattatcagaaaatttgagacaaacacagatcctattttgcagctgaacataatcaagtctatgttgaggaatattagaaatacccacccacccaccagcacctgacatgtgtttttcctcccatgggaaaattttttttcttctctatatttgtttttgttgctaatcagtctccaagagaatttttaggggtctgaattctgagtgagaaaaaatacccccacggcctgaattctagatcctccttttgatgtaaaccagatcatagtggacagactggatgagggtatgttttatcagcatatggcaaggtaaatctcttgaaaacactgcctttacaaaaacaaaagcctgccagcactgtattttttttaactggttcccactcccctctatttaaagataaagttgggaatgttgttttgcctttcagcatgagagtggccactgtgcacagacaccccagcaggtttgaaatgtgcaccagcaggggcctttctggcacaggtcccagtgtaaagatgctaaccatgcctaacatgtgttaggggtcagtgacctcattttcagggatgaactgagggtacttccaagcaaaatccatgcaaaggcagccttgtagctatcagagggaatctgaggagcaagccccttttacttcagttagttttgacagtgattattactaatatagaccacctttagaaatttagaagcattttttttaattggttaagtaaccccctctctactcctcttctggctgatttatggatgagaaatgctggtttatttctaataactggataacagttaagtaaaaaaaaagaataaaagcttaataatctgaggtctttcctaactaaaagggttcaagttttttcaagctcttaccatgaaaaaggcacataaaattcccctttatttaagatctccacacccaaaacacatacttgaaaataatgcatttgctgacatagaccaatctcttaaaaagagaaatatcaatctcttaaagatccaaggtttttactgacagacggcagattatagtatgaatgtcaccgttgttttcgtttgtgtaattggttgcattcttctgaaatcggtgggaaattagatcactgtgcaagatatctataaaaatatcagtgcacaatatcttactctaaaatatctggcaactgagtggtcacaatcgggatggccgtgtcccagtgattcagctctagtctcataggaaaaaaaaatccaccctttggctcccctctcatgtgcttgggcagagccacagccctgtgtcccacacgaaagccttaaacacagaagaatgggcctttcaagtcattagactaattttttgttggacgttatcttattctaaataaacacattttagattttgaaaagttcaagtcccgtttctgatggagaataattttcaaactcatgttactttgttcaccaaaaattacttctcagtgctaccaagcaaagcctctcatctttagtttctggctatgaaaagcagggggcataaggctgggcactgtggcttacatcagcactttgggaggctgagacaggcagatcacttgagcctaggagtttgagaccagcctgggcaacatgctgaaacccatgtctacaaaaaatacaaaaattagccaggtgtggtggtgccaactacttggaaggctgaggtgggaggatcacctgagcctggggagatcgaggctacagcgagccatgataatgccactgcactccagcctgggtgcgagagtgagaccttgtctcaaaaaaagaaagaaggagggagggagagagaaagagaaagggggaggggagaagaagaaagagggtggcataagccagaagctgtggattgcttgagcccaggagcttgaatacagcctgggcaacagagcaagaccccatctctttaaaaaaaaaaaaaaaaaaggcagggcatagatgaaaaagggtcgggggaggtaattatgaagtgaagaatttaaaatctggccttgagatcttaatcttgtatgttaaactagaagtctgtcagtataccttcagaatgcctcttatatcactttcttgtccattccacagctagcccccctaggtcttcttatcacattgtcacatacaaccatattttcacagtaacctacttcagtggctttctcctttggtgaaggagaacttaatgtgccaccaaaggagatcagtttgagcagcattgatcaaaacatcccatctcagaccaatcgaatctgaatcccttggctgtgacgtgtgtgtgtgtgtgtgtgtgtgtgtgtgtgtgtgtgttattcctacctgggagatccttgaggcacggtggggttgacaacaaggacccacagatcttatctccattttctcccacactcaaatctgacatcagttaattgggtcaatatatagctttcaatgatgtcttttcactcctcaaaactctttatttcctcctggtatctttatggcgaagttaaatcagatttatctggtgttccaaacctctcctgaacctgtccttttcgcctactcccccgtcccaggggaatcccctttgcatagagactgtctattcacaattcctcaaacctttctggctctttatttctacctaccttttcttccttttattctccactgaccaaatcccctgttgaaatcctgcctcctcctactggctgttttcccagctgtaacaggatgcagaaatggcccttcccgatgagcttctctgactttatgaacttctgtaggttcatctaccatgaattcaggctccagtatgcacagctagattaggacaaagacctaccctaaaaaagattatcatccatctctgtaggatatgtgatcctaagcagaacagaccaagtgctgttggagtccagagcgagaagggatcatgcctagtgtttatcagggaaagtagcaaatatgaagggatctttgagctggacccagaatttagtaggtgcgtctgttggtcggggagggaaagtgaggagggttggtgagcattactagccgggcattactgttattactaatgtcctgggtgaagtcacagtgccaggaaattatagggggcagttgaggaataaaaagatatctaggttgctttcaagattagtgttgattcatgttttgtttcaggctggaagtatgtgtttgggacaggttttaaagggcctgtgagcctatgccatagaagtggattggatattatggtttaaaagcaacaacgtttgaacaaatgagatatggtataaaacagcaatctattaaacagataagagtagacctattgggggcgaaactgaagataggcacacacaactctgctcagtgagccctacccttgatctcagtggttctaaacttttgggcttcacagaactcaaatggaaaacccctggtgttgagggaagagcctgggcttgctatcaagcagacttgggtttcattccttgctgcttacttattagttatgtgaccttgggcaagccacttaatttttaagaaagttaggtttctgcctctgtaatgagattcctgttttgattgaatacttaagaaataaatgataatgcatgtatagtaagacatagtgcataataataatacatgtaaaatgcttagtgaggtcccaggtatatagtaggcactcatttaattgcagctattttccttatcttgactttcttagaaccctcagtggacctttatacactgttcagtgcttccagcagagtaactagtgccaactacagcctcctggagattttttaaatgatctggacattatacagtaagggcctgaactggccagggagaaggatgaatgaggaaaaagaaagtgaccatattttcagctgtagggaaagctaagaagttaggaaaacaataaaaataagtcttctgaagtacatctttgaactagcactttaaaagtaagaggcctgtagagatttaaaaatatatatatgtgaaagcaaaaactgttttacttggttgtatgagtacagagtacaggagacaaagcctaggacatgcccaaggtggatagtctaataagagaccccacattaacctgggctccaaatggtgagcccccagtataagaatggacaggaaataaacccaccatacagaagagacaggaaaaatattcctctccccatttgtcaccagatggaagggaaaaaagtctgtcctgagaatttgtaaccacaaggaatccctcatatctataccagtttgagatctaaatttatccgtgtagtcttaacaaaaacaaaaacaaaaaacctcaagccaagcatttatttttaaagtaatcttgggttgatagtgcctctaggcaactggcagaaccaatctcaaatttctctttggaatatgacaacattaatccaggcattaaagacttaccaaagattagtttctaaggaatatgaggtcacaagcaacagtcacaagccagggaaatgtaaattggtgcaatcactttgaaatgcaattaactagaaattaactagtaaagctgaataagcacatactgagtgacccagcatttatgatcctaagatttaaaaaactcttgcccttatgcaccccaagtagtgccagaatattaatgacagtatctttcatagagggtccaaactggaaacaagacaaacatccatcaactccacagtggataaatacattatgtcataatcacataatggactattatatgttagcaattataaattacccacatgttacatgtcaacatggatgactctaagaaacacaacattagacaaaaaaagacagaatgatacataatatataattttacttatatagagtgctaagactcttaagtactaagactaagtcaattacataatatttagcctacagaggggtacataaatgttaaaactataaagaaaggcatgagagtgattaactaaaacagaggatgccttaggagaaccactcaagaagggactcgttgggagtcttcaaatccacttgtaacttgcattcttgagctgaaaagagggtatgtgggtgtttatgttatgatttttctttgaactgttcatatatgttttatgtattttttaaatgtatgatatgcatcagataaatactttttttaaaaaatgagaaagaactaaaaaagtccctaagacagaatattgaatcagatgtgtacacataactttctggaagggggtttgagggagagagtgaagaaaaaaaggtaatcagagagttacaccaagattgcatgcctgggtggctaggataatcttcggatatttaaataaaaacaaggaaatctattgttcatatttctgttgttagcgtctggttgcaggcagatgcattatatatctcagcacacttctgtttttgctgttgttgagtgagggaattgtgggacatggaaatgtcttggggtgaggatgagcactacgtggatatggagtgctgagcttagagagaatagtgggagccatagaagcaatgaggtcacctagaaagagcatgcaggaaggaaagaaatgtgagttctgaacattttcagtgatgggttgaggcagtgaggcacagaaggaagtgaacaaagagatgacagaagaaaagctcgagggaagattttcaagaaagagaaggtgattggtactgtcaaacattacaagaggagaaacttaaaagtcatggaacttgatgactggaaggtcattggtgattttatacagagagacagtattgattagtgagagaaactgttttgccagaagtgcaaatatgaattagtattaaggatataagtcagtgtgaacctacaccagtctttcaaaatgtttgatatttaaaggagaactcataaacatctatttaattgagtgcctagctgtgcactcacattgttaattacctgagttatctaattttatcctaacagtaggttattttattctcatttgacagctgagaaaactgaggtacatagatatttttaaaaacttaccaaacactaagaggtagaatagctgaaatgcagattcgggctgtgtgattccagtgctttggttcttacctagtccactgcactgggaaatagaggcgatcatcacttgcaagggggtgctgggtagaaaagtggaaggaaacttttttgtatttttggttttgttttctatgttggtaggcagaagacagggcaccagtagaaaaaaggaatttgaagtttacaggaaggagcatctgacccttcacatggctcacaggtagctgggaagatgaggtaatggggaaagattagagatttttttggcacatcaagtagaaagaggctcctgagattgcccccgccccccagaaaagtttagaagcaaaggagcagagctatgttatgtactcactgggtctccagtctgcattttttcaggtgatccactgttagcctgatcttgagtctcataataaacttaatgaggaaattctgatccatggaagatatacctgaaggtgcctaaaatagttaattcaatggatggagagacaaatggatgaactgatggaaaatgaacgaatgaatgaatgagctaagaattctcatttggaatagaccaaacatgtattaagccctttcttagaatggtgattaacagcctagactccagagccagactgggtttgcatccctgtcattcacaagctctgtgtccctgggaaagtcactcatcctgcagctcaattttcttatctatgaaatggagctagtaatagtacctacttgtgttagtttgctagggctgacatagtaaaccaccacaaactgggtggcttaaaataatcaaaatgtattatctcacagttctggagccagaagtccaaaatcaaggtatcagtagaatcacacttcctctaaagactctagggcagaattcttccttgcctcttcccacttctggtggtccctgccttgaggtagcgtaagtcaagtctctgcctctttcttcacttggccatcatctctcttatgtgtccatgtgacttctcttcttataaggtcaccagtcattggattttgggcccattctaatcccgtgtgacctcatcttaactaattatatctgcaaagattgtatttccaaatatagtcatgttctgaggttcctaatgaacatcagttttggggagacaccattcaacccactacattacttaatggaactgttataaggattacataaattaatataaggacttataaaattaatacatattaagtgatgaataatataattaagttaatattaagtgcttataatcatgtctagcttatagtcaaaggtatgaagtattactgaggttggcactctgaaaatgcttattctttccaataactgctttctgctgaataatatcaatattccactgccggtaaagatgctgagttactagattaattcataataatgcttgactctatccgtgaagctatttccttgaaaaacatacatgattcatatttctagtaaaatgactaagtagacaggacattaaatggtaataaaataaactttcatttccaaattcctcagattttggtcacccagaggaaaaaaagtgctgaacaacctgttcatattcatttttgtgcaactaattccttaggcagtggctttgtctgtgtgactttccatgtggctgcacccagcttgtctttgaacctaatttcctccatagtaatttgttgacatttttggatgcatcttagatatagcatcaaaagaggcattattttgatacaaggttatcaaaaggttaaaaaaaccagctatagactgtgttgagtaactcctagttattccatgaaatgacggcagtgagatacaacccactgatactgagtctaggacaaaatagtgtgttttttacacgaaggatataaacagcaatatattctctatgggcaaaattggtgggaaaatggttaagaatccaatatttgccctgccacttatgcaaggttattttagaggagagagagtaagaagctgtgaaatgaaagcaaataagtcattatttgtgccacatttattttgttccaccaatgtgtatccagatattgacacaatgactaacacatagtagacattcaacaaatatttgaggaagtggtggctgttttgtttgccggtggctaagagtaaaaggaggaacttattggttctttttctgtgggctttgtaatgtctcttcctaagatgtaagttttcttcagggcagtcttcattcgcctcttcttgctttttctctacattttccccctttttatttgaagtgggtggttgttatggttttggtgtggtaagcatgttgatacgtaacagggccaaggaaagtgaagaaaattaatttctgtttctgcgtgtacttcctaaaattctgaggtggtcaattagctatctcagagaattgtttgatatcagggtcattgaatgaaatagatataatgaaggcgtccaccagagaattttgtatcagtagagcaggagttcttaaatgcaagttcatgagcaagcttagcactcctgaaccacatgaaattatgtgcaaattgtgtatgcagatgtagatttggtgtgtgtgtgtgtgtgcaattgttgaaggaagataatttattcatcacctttattagtctcaaaagaatccagatcccaaataggtagagaaccactgaattcgaagatttgttttataccgattttgttttgttttagaggtttggatgggaaaattctgaggaaacttgagagcaaaatggacagtgtatggaattattaaatctttccagatatgcgatcaattcaaaggcttttttcttgaattataatacctctattttaacttctttagccgctgttgttatgtactccatgttggagtttgggatgcttaactcacagttgttatctctggcagttgaaatatccaggcagactgatgtcatttgttcccagaacggcatcagagcccttctgggcaaattcactgataagtcattgaacaggcacaaagaagatgatattttacggtgcaatgagccatccttgcgtggctaatttagttctaactgaacttataaacaaaaaactaacctctaaatagtgaacctctttaaaaactgcattctgtttttctttaaatccctggaaacttttatttgtcctttgtttaagttgaacttttatcttttgtcatctgcttaaccctctgctctgattaaatgattttcatgcttatctcaaattccaattttatgttattttaagtaatagctgtgtgtgctctcagacacctgactcggtgacttagtttataatctctggtattcacctttgtatctatcagattctcaacttaaactgctgctgctgctaataaagcctcctatattattccaggcaatactttaattaatagttatttccacccaatttacttatttgttgatgcattcattcacaaaaaacttacaggcacttgctatatgccaagaatgcttccagttgcgggggaaacagtaagatgaatattacatggagtcacattgccttgtgctgagacaaggcttgtggcaacccaaacaggccaaagagttaagcctcctcaagtgtacaatctttatgtaagttgggttactgtttatttaaagcagtggttctcaactaggaagactttgccccctcccccaagggacatttggcaattctggagacacttttagttatcacaaatgggggataccactggcacctggtcaatagaaaatgcttgtaaacattggacaatgagcaggacagtcccctacagcaaagaattattcagatcaaaatgccaatactgctgaggctgagaagccccaatttagaggcacagtagtgattgagagaggctcattactgtaaaagagaagggggcaggtgactccagaggcagtggcctctcctctgaggttctgagcaagttgactcttagtgaattgacccacactggaaccaaagaccattctgaggggtagaattttcttcttctcaattacatttccatgaaagaattagcattcctctcttaaagactggcatcctggctgctttccagttgcctactccttaatctgcctcctctgcttattctgaaggggctcataatttagggtggaagaaggacaggtataccaaaatctgtgatgttgtgtagtaaatacgaagagagttcaatgaaattaatgctgggagcactgagaaactaaactccacctggggggtctgggcaggcttcacagatgaggcggcatgaacaaagcctttgaaggcggtgtttaccatattgctgaaagaagacacttttctcttttaagccataccctgcatgattgcatttataactggtgacaagatgtttttggctgctctttcaggaaaacctgcttttgtattgtactgtattaagcaagacttctttacaaattttgcaggcccagctttgcagtgtctttcctctcaccatctttctatcagagatttcaatagtaggtggtttcaactatgaaattatagatgttagagtttagcagtagttcaatgttgcaagctttcaatgagtgaattacatgtcttgttgttctaaaattgtatatgtatttctttctgctgctgctcctacatatggctatgtactgtaggaaaatccagtagaacatcattgcctgcaaatatctgttagactattaagtacaacatataatgggttaagttgggatcatgcctataatcccaacactttgggaggccaaggtgggaggattgcttgaggccaggagttcaagaccagcctgggaacatagtgagaccccgtctctaaaaaataaaaaagtagcctggcatggcggcgcatgtccatagtctcagctactgaggaggctgaggctgaggatcacttgagcccgggagttcgaggctgcagtgagctgtgattgcaccactgcactccagccagagcaacaaagtgagaccctgtctctaagaagaaaaagaataatgccattttgaatccattaatggaaaaaattgctgtggtagatatggataaaaggaatagatgttacatttctgctacaagaaaatagtggggtcttcataatgtaattatcaataagttatagaatttctcttttccctctggaaattgtgtgttgatttaaggtgcctatactttataggaaattttatctctcaattcagaaggaattctgacatcacacaagggataacattgtacccttgaaactaacttttaaaaaatgtgtccttttcttggttctttttacaaagaacttttattcatattttcatgttagaaataaaagagttcaattattttagtttggaccttaagctggatagtttataaacatgcatattagcttcatttttcatcaaaatgtgtttcttttttattttagtctgatgccaatgcaagttacttaagagcagctcgagctggacaccttgaaaaggccctcgactacataaaaaatggagttgacatcaacatttgcaatcaggttagctggagttattattgaattttttacttaaaattctaaaaatccagacttcaagctccttaaagacttcatttatttgtggggtttttttccattgaattttatcagcttgtcattgtcaaattattctctgttagaggaacattcagaaatgtcagcatatgtcccttaataattaatttctaaaatttagtaaataatgataacagaacaacccatccagttttgaagtactttgattcctaattcaagattcaagttcctgcacagcatacatgcaagtgatcatcaggtgggactttataatatctcaggagttcttggtcggttgtttactgctctattttcaacctgctgagtagagcttttcctttacttttaatcagaatgggttgaacgctctccaccttgcttccaaagaaggccatgtagaggttgtttctgagctgctgcagagagaagccaatgtggatgcagctacaaaggtcagtatcacatatttaatgctttttgaaccactcgccatgttctgtgaggattcagccctcagtaagaatgggggcacatatctcataagatatttgtcaaatttgttctctttggggagaacaggaaaattcaaaagatcgatgagttgatatatcttgactttcatttcacagaaaggaaacacagcattgcacatcgcatctttggctgggcaagcagaggtggtaaaagtcttggttacaaatggagccaatgtcaatgcacaatctcaggtaagcctacaactccatgccacagacattttgttatcatttacaaacaatgttctttgggtcaggtgcttgcttagttcacatatcctctaagaacagaatacttaagaactatatttaaaaagttatatttggcacactttggaaggcaaaggcgggcagatcacttgaggcaggagtttgagaccagcctggccaacatggtgaaatcctgtctctactaaaaataaaaaaaattagcctggcatcatggtgtctgtaatcccagatacttgggaggctgaggcacgagagtcacttgttcccaggaggtggaggttgcagtgagccgagattgcaccactgtactccagcctgggtgacagagcaagcctctgtctcaaaaagataaattattgcagattatttaaattcatatgtattttcatttgcaatatatatgtgtgtgagagagagatttttaaagcggcctatctataaaagatactagtcatagacacaaatgtttaaagggtatctgtaatgcagggtcttacactattttatgatgctagcttaggttcaatctttttaaaaacaggcagaaggaactttaaaagtcctcaagtttaataaaaattttcagattctttgtaatgaacataggtcctcctataaatcttacatggtctttcattgaatttctaagaggaacaccaataggttatcatttatcatttgatagactttgaatctaaaagaattaactttgctttattatgtttaaaaatataggtcctcattattcaagtattcattatttgagtctccacagacaggtcatgtaggaaagcaaacatcatcataattcaaaaatattcactaaggacatgaccacatttaaaactggttcccactcaaacattccttccagtcgaatgctgacttccatccttatttgtcattgtctccccaggggtgttggatattgaacaaattgattgcagaacaaaactgcaagttttgacaaagacactaagtttcctgaagtcaaggaaagtgatattggagaacttctgggtgcacagctgagctgtgggtacatggcacactctggcagtattaggctaggaagcatgtgaaaagttaggatgatttcctgttagcggtttcatataagaatgatttgaaaatacatagattaaatgaagacaaaaagataagtgagatctttggatggcaaatacttcttccaaaagatggtcttttttgcttatgctatgaaaattaaaaagtgaagaatgtcaacatatatcattttgttgggaaaaataacacttggtttagtctttgttcattctgagaacatatatgaatccagttataacttacattttattaaatcatataagcctatttttataatttccagttttatcttttaagagtaagtctgaatcaaactttacaaaattatttactatggccttttgctctccattttaaatgcacttgattttaccaggattttctagtatgattatctttggatattgggagtctcctctgttttatgggttcacagaattgtagtgacttcctcccctgcttactaccgacatagcagtgatagctctgatgccatcaaatgtcagagtcaaagaaaaggaactgcacagtgcttccaactgcatggttcttgtatatttgctctaaattaattctagatccctgttacatgatctatgccaattattctgattccctaggagagttctcttggagtaataatgcttttccagaaaggaatgatgtaaaattgaatagcaacaagtatggtactttgagagagacacagaccagcttactacaatagaagcatcatgcttttaaacggatgtttttcaaaataccccaataatattttactgaaatgtggctaggtagttttaggctctgagatagtgggaaaactctttaatccattttcatttcttttattattttctcaagggaggaaaaaatcaacctaatcaacctcctcctttcaaacatcacatccattattgactattaatggttagagtagccatggttttaaactggctcggcaatgtttgggagaaactgcagttgaaataaaatcctaattagttctaatttcaatttatacgcattccacacctatgatgcagtaaggcagaagaacatgtgaaattccctgttacttacagttgtgctcggaattaccagccacacatggcacagcaaagcatttgccccttcatctgaacacctgccctcatatgccttctgaactgcattgttctgtggatggaataagtaatgagatgaccctgcagaggaatggagtttcaatgataattcctggtaacaactcttcagtaggaactgttataaagagtaacaaacaatgatgtcacctccatttaggaagcagcacataaaacaggacagaaatattaatattcaagacagcatctctgttgacatgaaattttaacctgtaagtgatatttaatagccaacaaaaaatagggtaaaaagagccccttactcttctttactataaaaattctccttatcttaaatataaaaatgacattgggcaatatcaagttctcatcttataaaccaaggctctataaactaggaatttgtagattttaaagtaatttttgtcattgccttgatcttaggtcttaacaagttaactctttcttttagtacttaacattccagtaatcatttagtcctactctgagaaagaaattgagttgactaaattgtgattataaagaattctattattaagtccttaatactttatattagatgtatcaacaatgattaacaatgtttgctattgaaaaaatctcaaactgcacagtcaaatgacatcccccactcttctctccttctctgtctttataatataaaataccaactgaatttataaagaagcaaagtctgtttccaataatattttaactaccaaagtatttttagtgaacagatttttctagtggcatttgcaaaggtaagaccctttaggttagccagtgcctccttggtctttctgggtactctgatattccctatggtgggaaagtcggatcctgacaaagttagacagtacaagtatgggactttggttatggttcagattgagcctctgtgaccttatattgcacctctaatctaactgaccttcatgaaaattagtaacgtatatgaatcaatgcaaatctttcaccatacccttaacatcttagttaaaaacagcactttatgatgtgcaaaggctggccatagaaaactagaatgagtagaaaaatttcatggatgaaatttaagcccttttccaaatgaagtcataggaatacttattatttcattttgatgtgtattagacagcatgcctcagtactatctacaaaattataagtctgcagatttgcatgcttataatagcaccactataaacattcagagcagaaggtattgaatatattggataaaatcagacttcaaacagcatactcgttccatcttaagctgctctgccttttgagaatttaatctgttgttgctacagaaaagaaaatgcaaattgggcacccatatattcctttttagctacctttgttttggaaatgttctaagttaggaaattgttataaaaacagtggtgtacttttttctcttattttgaaatctgaccattctcccaatccatgtgccatttcacagcaaacagttatggctctaggttgtctaatgacaacacattgagttaatgatgcctcaacctctttgagctagggagtgatggcaatatttttattcgctctttccaaagaacacttctaattttctctctagaatcataactaaatggttatgtatgtgttctcatgtcttgaccatttcttgagacataaaatttgtaattttggggtgttacttgaattacagggagagaaactaacttaagcacaagagggaatttattggaattagttaaggaacacagagaatagaaagctaaagaatctttcagaaagctttggaaacccaatagctggggtggagagtgggagaacagagtgagaagaaagagagtaggattaccctttgacctggttcctacaggtcaatcaagactggagagggagaatcaagggtggacctaaaagagaaaacagaagatagcctgcatgtgtgtctaccctgtaattaatgaagggcaagcttctctgtctcagtccatccaggacaagtcctacctgcataatggggaataggtaattctctgaaagaaaataggggtgacattgtcctgaaggggaaatgggtgtgtgggcactggtgaccaaaactaaagcaaaataaaacaaacacccatgcactacaaatgaccactgtaaaattgaaatttccaccatgaaacactcaccaaaaacattttatcaatatagatagcagaaatagcataagaaggccaagcacagtgttcatgcctgtgatcttagcactttgggaggccaaagaaggaggatcacttgaggccagaatttgagactagcctcagcaacatagtgagaccctatctccacaaaaatacaaataaaaaagccagatgtggtagtgcatgcccatagtcctagctactcaggaagctaagggtggagaatcgcttgagcccatgttaaggctgcagtgagctataatcacacgactacacaccaggctgggcaataagagcaagaccctatctgtattagcttgttctgatgctgctaataaagacatacccaagactgggtaatttataaaggaaagaagtttaattgactcatagttccacatggctgagaaggcctcacaatcatggtggaaggcaaataaggagcaaagtcacattttacatggtggcaggcaagagagcttgtgcagggaaactcccatttataaaaccatcagatcttatgagacttattcactaccacaagaacagtgtgggggaaaccccccccatgattcaattatctccacctggccccgcccttgatacctggggattattacaagtcaaggtgagatttgggtggggacacagccaaatcatatcactatctcttaagaaaattaaagaaatagtatcagaccattcaaggacagatatcatatgattctgtttatatagaatatccagaataggcaaaactagagagagaaagtgcattagtggttactagggggaaatggggagtgatcactaaggagtatagagggcttctttttggggtgatgaaaatattctagaattagatagtgggaagggttgcccaattttatgaatatacttaaagccactaaattgtacacttttaaaaggtgagctttatgatatgcaaattatatattaataaacaaatattttaaaaatcaaaaaacaaggaagtatgtaactgttcagaaaatgaccaactttcaggtaataatcttaggatggcaagcactcaaaaagaaagtagaaagctattgtggaaaaggaaaacaatgaattatagggctgcatcttgctgtggctgttgtctacaaatatttctaagtagtcctaattctgtgcatctcagtttctgtcatcataaaacagggcatgtagagtgatttcagagttgtgccttttaagaataactcttgagaaactcccggtctgtaagaaagcattaccttaaaacccagtgcctgagtctgggctttcttcatggatcctgaaatggttggttctggaaggaaactgtgagaacagtggacactcactagagccagagatgtgtggatagactagtgtttcttaggcaatcttgggccacagcagacctccaccccaacattgagaacgaactgacattacttgtcttgacataaatatcttgttgatattcatgtctgaaagaaaaacacttattttggaattaaaaaaaaaaaggtgggtgtggtggctcatgcctgtaatcccaacactttgggaggctgaggcagatggaacatgaggtcaggagatcaaggccatcctggccaacatgttgaaaccccacctctgctaaaaatacaaaaattagccgggcgaggtggcacatgcctgtagtcccagctacttgggaggctgaggcaggagaatctcttggacctgttaggtggaggttgcagtgagctgagatctcacaactgcactccagcttgggcgacagagtgagactctgtctcaacaaaaaaaaaacaaacaagaacaacaacaacaacaacaacaaaaaacttctaaaaatctgaacctgccctctggaagtttcagctttcggagagagcacttgatgagggaagatagatgcttagtacctagtttagctatgagaaaaagccatactggttttggccttttcttttcttttcttgttttgttgcttaaagaatatttaaattaactaaggatgtaatgatctttcattttggtccaattagaaaatgagaaaatagcaatatgatgaggataatcctaaactccctttgaatttcactcatagcgtcatagcactgggaagagggacaaagatgaaagacacacggacctatgggcatgcacacacacacacacacacacacacacacacacacacaaatcccacagtgttccaagtactccatgcttcatgtttaaatgtggtagaatgtttcatgataaaacagagtaacagtgggctccagagatattatcaggtagacaatttaaaaggaagaagattgaatgtgatgttgcattccactgcctctaattttgtgtttctaatcttgagcttggcaactagatcacctaacttgttacaattctgtgccaaatagaggaagtagaatagaggaactctctgataagtacatagctatggtggatttgttatgtggcatcgcatttatctgcttgaggatctttttaacttactttctaattctcagttataagccaaaagcagtgtgtttgccagaggctgaacttatggataagtaaggtgatcatatagtagttgatatttataataatgaacctaaactttttgaatcacaaaaggttgaatatttggtaacattgtagtttagaatatatttacttttattctttgaaattgcgtaatgtatacagtaaaatttctggaacattcagttaaatagaactgcattctgaaaagtatattcaaaaagaatttactggctcggtgcagtggctcacacctataatcaagcactttgagaggccaaggcaggcagatggcttgagctcaggagttcaagcccatgctgggtgacacagggagacccagtctctataaaaaataaaaataaattagccaggtgtggcggtgcatgcctgtagccccagctacttgggaagctgaggcagaaggatcgtttgagcccaggagattaaggctgcagtgagctgtgacgataccccggcactccatttgtttattattattattattttgatacagagcaatggagcgagaccctgtctcaaaataataataataaaagaattatagtttgaaaattgtttgatgcttatatcttgcaataagattttaaaatagtatagtatttcatagatatgaaatacattattctagagaaaaaatatatatacaacatttttttagtaggaaaagatgtaatatgcatattaatttgcttgaatccaaattctttgagagttgatgcacatttcagagaggcacacagacacattcaaactaaatatatgtgcatatgtatgtacatgtaatatgtatccatatatgtattctgaacattaaactaccttagcaaaaaaacacaaagaaaggaggcctacaaaaaacagactgtgaattagattgaatcataccattatgcaaatcggcatttcttttttgctcttaaagaccacatctgtggtaactttgaagctatttgaagctatttgaaaagctttgaagctatttgagattaatataaattcctccctgaactagtcaaaactagttcagatacttttgtgtgaaaatattacatgtttatttaaaacagataattgatgcttgggagctacagtgactaaatgtgtttttcttcatagtctcatagcatctagtaaaatacttactcatggtagactctcaataagtggttgatgactaagtgagtgtacttatttctttaaagtgggtaaattgctttgaattatacttggactattaactatgaactattaactatgagctatactcaaattatgaattatgaaatataattttgaattacacagatcaggaatttagcttaagccatggtgcttgggttttctaataaatatttatatctatatgaaagtattattaaagttattgtatgtgagcacttcttggagcataaatcatcagtaccatggaaaaatagattgtctctggaaagctgcagacaaacattttttttcttattttgcagaatggtttcacgccattgtatatggcagcccaggaaaatcacctggaagttgtcaagtttcttcttgacaatggtgcaagccagagcctagccacagaggtaagatactgtttttttcctgtgggtgagttcacgtatttatagggcattttgaaaacctggagttgtgaatttgtcctactagtatttcaattgaagttttatattaatgtgtgggttcataagttttatgaaatacattactataagtctacttttaatttttacaaatcttctgttgcatagatactctttctactcttaaatgcccgattctatgctataattatgctattattttaatatttaacgtatttgcttgagaattcttttctgtctcttacaattttggcttataggcaaaggcaatcattgttttggagtaattgatgtgaactatcttttcaataaaacattagttttaaattgtttttccaaatttaagtttacctaattataatgattgaatttgtattttttaagttaactagacttaattcatagttataaataaaactatggtactttttttggggggggggaggggggatggagtctcactctgtcacctaggctggagtgcaaaggcgtaatctcagctcactgcaacctccgcctcccgggttcaagcaattatcctgcctcagcctcccgagtagctgggattacaggtgcccaccacccacacatggctaaattttgtgcttttagtagagacagggtttcaccatcttggccaggctggtcttgaactcctgaccgcgtgatccacccgcctcggcctctcaaagtgctgggattacaagtgtgagccaccacgcccagccaaaactattacacatttttaagtgttaaatagatgtggtatttgaagaaaaaaaatctttgctgtctagaatagaataattatttaaaaatagaaagttatttaggccattggcactgtcttaggtaatgttgtttattttttaaactaatctggatggaagactggaatcacttaagcatgtcaccagatatctattgctaataataaaggatcaatatttgagtattttttatttctaacaacacagtgaattagggcagatgcagggttatccctattataaaccactactcttgcttgcatgctgatgtgcttcctgaatagcacagaaaagatggcagtagataaactgcatctaatctcacttagtttttgagattataccttctagggaaaccactaaataaattaagagatagctcacagaaaacatacacaaacaaacataaatatatgaaaatttctcatcctcatttatagtcaaatactaatttattagtcagatacaaaataagatctaatcttttgcccatgagactaaaaacaaaaatttcatggggagaggaaaccagaactttcctacaatactggtgaaattgattgttggttacaacacttttacagaacatttggcagtaactatcaaaaactagtatttacaagcctttttacttagcagctgcacttctaaaaagttatattatagaaatattagatatatcaaatatatattatagatatgtttgcattaggatgcaaaaatagtataaaggatgtttgtcaacacaattaataatagcaatttttaaaaatcagaatctaaatttacaccaataagaatcctgtttattcagaactatttggcttggaaagaaaaaagaaacctgttagtaaatgttcatatatttatacaataacacgctgttagcactgttaaaaacgaggcaaggctctatgtactgatataggaaaatgtccatagtagattgttaccagtggtttgccctgagaattcggagggagcctttgtacccatcagtactgttgggaatttttatacatatttttttattttatacccatcagtgctttggggaatttttatcatgagaatgtactatttttgtaatagtattcttaaagctagttaggaaataaccactggttgatatcaaaataacaaacatttagccgggtgcaagggcacacaccggtagtcccagcccctcaggaggtagagacaggaggcacttgagcctagaagtttgaggatacagtgctctgtggttgcacctgtgagtagtcgctacactccagcctgggcaacagtgagaccctgtctctaaacaaacaaaaaagaacaaacttgctaggcagagaacggtgcctctcttcacactcaagagtagctattctaagcacactacgatacacacattgtgtcctagcggacaggggaaatagagacaggcagagactgttggttaagagaaaacccatcctcattttttggatggaaatattaagtactgtaaataacctaatgaaagtgattccatagctttctttgtgaagatggcgtaggactcttttttcacactgtgatgtacggatcactaagtatctctcctttagaagcaaacataaccccaatttactgctaatagattagaattagattgtaaaccaattaccagtaactctcagagctctctagtactttttaaagttttcaaggccccaaaagaagccctacagctaacttaaagaaaaatagtacgtgagatcttcaaatcactacttcagtcttttagcaaaggatatatattttaaagtttttactcttttacattgatttaatttcatgttatttttgtagttttaagggaaaaaacaagaaacatggtgtctattaagtcacgttcatgtcttcagggaggttgctgttatattgctatataaacaacatctaattacctagagatgtttgaacctttgaattttttctcttcttttggattattggaattggagaataagaacaacaacaggaaataagacattttattcaaatgatattctaattactgtattgctctctcattagcaataatattggtgttatttatagagaagtctgtatttacagaacaaacagtagggggcaattaaaggatcctttaaatagcaagtttttaatagaatctttaattcactacacgatgggatattgccaaattctttcaaatgtatttttttcagtaagcctggcacacttcaaatcttgtatatatgtagcaagacttaagtataattgtggtttttaaaacgtttttgtattactgtgtactgcatctcatatcttttctctctatatataatcttccttttgctaattacgattctgaagcacacagtatatttgtttgttcgtttattccatgagtaattattaagcacctattatgtttcagacacttcataaggtactggatatccttgagcaaccaggggatggaccttttttccagtagcctctatcacatttcctttctgctcatttttctctgaagaataactgcacaaagcaaaccacaccatttaaacttggttttgaaacaaaatctggagctgctaattttagctattaacaccttagagctggtatctttgtgtctttaattggcttatgcaggaaacatattcttgtcactgctaatcggctcagttgcagtttattttctggtacaaagtagtttcctttatgtataggtcctgtgaattttaaaattctcatcagtggaaatgtagccattttgtttggtttcagagcagaagtggactgtcatttttaccccttagcttttgttcaggttttttaagtgagatgcaaaattaaatctcaaaacacaattttccttttgccacactcttatttaaacaatgcatattttcttttttttgcaaaagtaatacattacataaatgagaaagtacaataagaagcaagaaatctctgttaattttccctagagataacattttacccgattgcttgcacatgtacacattagatacatgtatgtacctttatgaaaatgaaaatatatatttacattgacatgtagactacttttcttgttatatcctaaagttcctgtctttaagtgtaaacctatgatatcgtttttgtgacatcttggatgtatctagtctttccctgtttgttatctttcttaaggcttcagggaataaccttctagttgttttggttatgttattgttttcctttttcctgctgtctttggtagtaaagttaaaagaaacaggtggcatttaagccagatcttgaagcatggagggtagaggggatttgtatacatagagaaaagaagagggcatttcagggtgggggaaatagcatgagtacaggtgtcagaggagagtgaagtctgtacgtgcataatcagtacagacactggcagaaaggactttataggggacagtactgagcaataatgtcccttaagtgctttgggtcaatgttttgcacatcttggatataagtatgctgatttgcattcagtcagatgaattatgagagcctttctccatatgctagcaagggaaggaatgttgaaagggatgttttaggaagaccttggtgcatatgtgctcctatgtgttttccaaatgcttttctttaccatgggactacagaaataaaatatcatgacccaaataaaataataagtaacttgcatgccagttctctagttaaaaaaaaaatgcccttttgagtatataataatgaaacctttgcagaattacaatttgtgagccagtcctaggatttttctaccctgtgctgttttttctacattcaacaactctaggtaatccacaagttaatttcactgcagtgaaatctgtagctgtgtcccctttatcaagtcccagggcaacacaaaggggagagtcaaaatgtatagagtatgtatgtgtgcacttatgtctgaatttattctaaagtcgtgttttaatcaaattcttagaagcagagaggaacatggtggttaccagaggctaggaactgggagtaatggggagacaggaggtaatggtcaatgaggagggataagtttttgtttttattttgctttttttgaaatttattgcacaacttgattaacagagttagtaataatgtattgtacatatcaaaattgctaagacaataaagttcaaatgttctcaccacaaaaaaataagtgtggtaatgaagatgttacttagctggatttgtccacattgtattcataagtcataatatcacttgtacccctataaatatttataatttttaatttaaaataaaatttaaaaagaaaaaagacaataaccagaataaatatatagagtcatgttttgcatgatctttgtgttgtcttctctcaatggtcacagaagccaagagtctttctcttagctctagagaccttagcctctatagatctttcataaagcaacaatgagtacagttcatgaattcacctatcctgacagcaccaggaatatgcgaggcaacagggcacagtaatgaaccagacagacatacatctcagtttttaaaaatcagtggaaatgtttacatcttatttaaatgatctcctttgaaaactttgcctggatttagcctgagatttttttttttcttttttttttttgacagagtcttgctctgtcacacaggtgaaatggcatggtcttggctcactgcagtctccacctcccagattcaagctattcctctgtctcagcctcccaaatagctgagactacaggcatccaccaccctcggccaatttttgtatttttagtagagacggggtttcacaatgttgatcatgctggtctcgaactcctgacctctggcaatctggccgcctctgcctcccaaagtgctgagattacaggcatgagccaccgcacctggccctgagattattttatgaatattgatattatagcaactttttcttttatatgtagtatttttgtacactttcaaaattttcccaattaatgtatattaatttttaatggaaaagaaaaccaaaacccatgaacttattacaaatttcttagtattttttactttgtatagataaattttttttgaaaatatctttcacatttctgtccattcaaatatgttgttagttttaataatcccaaacaaaaattgatgcttggtcacttggttgccttcttatttgttaatttaataaaaaagaaaatattcattggagcccatcttgacccatccatttatttgcaggatggcttcacaccattggcagtggctttgcaacaaggtcacgaccaagtcgtttcgctcctgctagagaatgacaccaaaggaaaagtgcgtctcccagctcttcatatcgcggcccgaaaagacgacacgaaagccgccgccctgctgctgcagaatgacaacaatgcagatgtggaatcaaaggtgaggcacgagggacacgggcctgtcatgcaactctccggtgttagacacacaacctttaagagcacccggtctccctcttcgcaagcttatgccatgcctttaacttcattgaagggaggaacaatgtgtgtctgagctagccactgaaggcacagcctcccttcacatgagaagttggggggtgaggggaatgcggccctatgcgtgctaaaagggaggccacctcagaagaaatcaatttctatgcagtgatcatttctttcctttgaatatagttttggaatatattcaacagttcagctcaaacatcagggcgaaaaattacaaaatactgaagacagtgtacacaaacaaacctctggttgatacccaagatgacaggccaggcactgagcgtagatcagctgcggaaagcatgccagcagcaagagagccgcagccaaaaattcccatcgtcttgacatgtggtacctgaaagtctctgtgacggaaatgtgacatttggactaggccgttgcgtagcccatcattcagtctagctttctttctgtgcctattgtgctttcatcagagcttccatcctcattacttagctgtcatgagctttctgcaatccatatcaccaatagtgaactaaccgttcattttttcctcctctttgcttccaaatgtgttaacctagatggtggtgaatagaacaacagaggtatatatatatatgcatatacgtgtagtctatatctgcatcatcattttcccatgacttagtgctgctgcctcatgtctctcccttcttctttgcatcgccttctgtaggctagatacctgctttatccccaatccctcctctccccaaaggagcatgtgccagataagatagcagtagtttgattaccagggctttctgcagctgaacctggtgtttgaaagagatgaggaatccttgactcttaagggtattgcaatagagctgtgtgagatgaagagtctggacactttagatgtttatcagctatatctaaagctgcagacaaccctgtcattctactcatccaggactcgttttttagggttgtgcatgacacttaccctctgtggtgtcagcaaaaggaaaggtatttcagaatggtgtcaatatgacccacccttctacaagactcagtgagatagctagcatggctaagaagcttgctaacaaattagaaatgcatctagttcctataaggtttcaatctttggggactaagtgaatcgctgcatgttttagcattttttaaggaagtaaaatgaccttggtatgaacaatccaaaaacatgtgttattgaataggcattggctaacaaagagattaacttgtggattcttcatggaatacaattgcccattatataaaaccaactttgtggtagtacgtcttccccccaaaactgcttttgtcatgaaaattggcatttactgttcagtaatatgaatctatatcaaatatataaactaattgaattttgagtttcaatgcacaattctatcgtcagtaataaaacagcggcactaatcaagctatcagctataaagatttttctcatctctatcttaatttcttgaaatgttggcttttatatagttctgttattggattactaaaattgctcagtctccacccttggttcctccctggctattcttctgcctgtaagtttggggtttattagaaaccctgtgagcaattggcactgatcgaaacctagtacagaatggaacatagacctcagcatattttgcttcctcatttttatttgggcagggttatgatatttgcctgtcaggcagggggctggcaggaatcaattgaatgtctgctatgttttctttacagagtggcttcactccgctccacatagctgctcactatggaaatatcaatgtagccacgttgctgttaaaccgagcggctgctgtggatttcaccgcaagggtaagagcacagcaatgtgtaatacctttaaagcatttgcaactattttatactctctttccccaacatgaggatgttgggacaaattttctccaagagtccttccagtcagtgaaggctatgatttctactcatcctagtgtatgttcttgattttacataggtgtgcctgtttcctagcaggagaggtaaaccaagatcaggaatgctagctgggatggatgataaataaatctataaatgcatatatagaagatgtgattcaaggaatcgtggctggggacaacaaatagttccctaagttaaaatttctgaaacccttagaaattggtcagatggcactcagtgctctagagatcagggtcttgaccttacaatgggaatgttctggaatacctgggtgaggcctaaactacagaatccaaataatgagaccatcttttgcctttatcttctgtcccctacaaactttcataatgagtaacaagttggtgtaacctgagtaagctcatatccattgaagaaaggaattacaatgtcatatggcccactgcacagcaggttggacatccaaacatagtagcactgctctcaatttaaaaactggtgttcagcttgaccatcagaaacactgttggaagtacaagtgaagctggaggcaggatgaagtagtggctgaaatcctggactctgagactccttaggttcaaattttggctttcacttttttccctgtgtctgtcagtttcctcatttataagatgagataatatgaattatgaaattaaataaacaattataaaatatcacctctccctcactgcgtcactgaaaattaaaagagatagcatatgtaaatcactcagccggtgcctgatgtagtatcatcactaacagcagcggcagtagtgtattagtctgttttcacattgctataaagaggtgtctgagattgggtaattcataaagaatagaggttcagttggctcctggttctgcgggctgtacaggaagcatgatactggcaccagctcggctcctggggaggcctcaggaaacttaagaataatggcaggaggcgaagcagggacaggcacatcacatggccagagcaggagcaagagagcaagaagagtggtgctgtacacttttaaatgaccaggtctcatgagaactccctcactatcacaaggacagcaccaagcagatggtgctaaaccattcatgagaagtccttccccatgatccaatcacctcccaccagactgcacctccaacatgggacactacgtttcaacgtgagatttgggtggggacatacatctacacaatatcaagcagcactgttattttgaacgtagcatttgaagtcttattttttgctgaaccctcacttcttagaagagaaatgaaactagattagatagggagatagtgtataatgctagcaacagcagtacagtggtagttgcatcagcagtaaaaataatatcatttctgaagtctttcctgactgtaagatgccaggctatgcattttatctcacgtatactaatataaggaaaggtacagtttatccttattttacagaagaagaaacctaggtttagagataagaagtagctgctttaggatcacagtgctagcaggttggaagaggcaggatttcagccccaaagctcttaaccactattctctcccctaggtaacttaaaggggtttattttactttccctcttataatttgttagttctataaaaattaataagggctgagattgtactaatagaaaagctatttcctatcctgttgtcatgagcttgccgaaagccttcatcagtttaaatgactggagagcgtcagtcagttttattcacaatttttcttattgtgttaactacatccttgatgtggcagatccaaggcctagtttgacactttgaaggacaaagctaagcccttctttaagtcaagtataaacagggtatgtcagtgttgaagctgaagttcatttcaagatgcattcttctggttttatttctgtaattcatagcataataaaacctcattaagttacatcttctaattaggacattcagaaaatttatgtcagggtggtgtttgaagtttgtctttgtgcctttgttcagaaattttctgatgttgctaaaaacaagaggattagagaaatgtttaagcaatttaagaggacatattacagtatattcagacttttccaagtgattctaaagtgttcatttgcattaaaacaatgactgtggtaatgacaaaagatgcttatttattgattaaaaatcagtggagacatcagacccacgttgttaaccttcctgagttaccatatatgatttaaaatacttacactgtgcttttgtttaaaatatgttaaaattcagacttttcactgattcagaaatgcatttttcccagtctttcctaattaatgaggtctaatagcattctgagctgaaggctgtggtggaatttgattttatttaataggaggcttgggctgttgcatattcccaaatgagctatgcttctctctgcagtgggtgattgatgactggctttagggtacctgagaactctttttaaagagcttaaactgaggcaactgccagctgcctcaagcaatccatttgaggtcccacatctgtagcaattttgttgtataataatctagcatctccactttcatattacagaggcttctcccttcccagcttccaaggagtctttctaggtcatagttctctcaagaaggtaacagaaatagcaggtgaaagtaagaggcccctgaatgcagacaggatcaaattgtatccagtcagagcaataaagggagcattattaagcctcatttgctaagaattggctgcaaattgtaaccataaatcatatgcttcagagctaggtttggagagaggtattgatgaggtggttagaagtagattaaaaaacagcagcaccctttgtcttggggggctgcaatttctgttttctgcctgtgacaaaatacagtagggagtggaagatttaaatcagtgaagaaagaagtatgacagataaagtcttgcagttctttatagcactgtagactgagggaatgtcccagagagtgaccacctgctagcaaagagagctggggaagaggaagaatgacaacacttctggaatctttcctgcatgcaatagatgttcctttccaaagcagataataggtagaaacaaaggcgatgtgactgaagggagtaaacaatagaaggaattgctttctgtattcatttgtagtgccaactaattcatgcagcagtaaagcaggtcccagtcagtggtgaatgtatacttctgagtagcagttccggtaactgatttatagcatacttaactgtttcaataacacctttccttcaatttttattatgatgtttgcattgtaattttactaggtatatgtaagatatcctgtctgacatcgtcaatatttccttttggattatccttggagatctattcaggctcatgggtctgctgcagggagttaatgtagtagctgctgaatgctgcaatgcagcgtcagcattcttcattctttgaactgagtctgctgagatggcactgacactgtctgaatttatgcatgacccttgctctctttgcaaatcattctagctctcttgggaaagagaatgtaactaaaacatactagagctagtactgattgtcattccagtaaggagcatttgtgcactagagtaacaaaaggccaaattgtattatgtggttgcctgcaaagttccctttattgattgaataagatagattaatactttgctggctgaattttttcatcaaatacaatggaccacctaatctaatcttcactcttgtcattggcctttctcttgtaaattattattcaacttcccattttgagaagataattgaataaagcattcttctgttagtcttgccatttagcactttctgttttgatctctgaaaggattagggatttatgtgtttggattctatacctcatttgtttccaaaaagatttcgggtggtttacagattaaaatatacagacgtgaagggcggaaccaaaaaagtaaatgttaccaagcagcaggaatgagccagtaaatacaatggaaaataaatataggccttaaaagctttgatatatatagtggaaagggaagcatggataatagagtttccacttttgacaactgaaatcctgtagttacctatagagacaatttttgtgtgaaataactcaaacattatttttatcatatgaatccttaagaacagagaattaaatagttagcaatatctttagttactatacttcaaaaggctcaattctacttcctactgcctatgactgctataactccatctgtgaaggcaccttgcccagagaagctgagagactgtggcccagctacttaactttatgatgatctagttgtgtaggaaagaacttggcatgtatggcacagatcagtgactggttaacatgtccattgggctgcctttttcaaatattgggtattttatacaaggttttgatcgatattggaccacattcagaaccctactaaatcatacaaagggttactttatttaagatattttaatgtttggataaaatgagagcaatgtttttagatacttgaactactaagcctgttggtggaaaaataaaaggattagacttctcttctgcacttatatactgttggtaggaacgtaaattagttcagccacaaattggaaagcagtttggagatttctcaaagaacttaaactaccattcaacccagcaatcccattactgaatatgtattcagaagaaaataaattgtcttgccaaaaaatacgtgttcacatgttcattgaagcactatttatgatagcaaagacacagaatcaacctaggtgcccatcaacagtggactggatgaagaaaatgtggtacatatatactatggagtaccacacagccatgagaaaggaacaaagtcatgttttttgcagcaacatggatgcagctggaggccattatcccaagcaaattaatgcaggaacaggaaaccaagtactacgtattctcatttactagtgggagctaaatgtggggtactcatggacataaagatgacaacaatagacactggggactactgttgtggcagagttgaaaaactacctattgggtactatgctcacaacctaggtgatgagatctttcgtacaccaaacttcagtgtcatgcaatatacccacgtaacaaacctgcacatatacctcctgaatataaaggttgagattatttttttaaaagaattatgttctgtccaaacctgaggccaacatggcttagcacatgcatgagcaaaacagtatccatggatgagcattatctgggggatttcttttctaaattcaatccaatttagcaatatttatagagcatctactataagctggacctgaaggttcagacttgagttacctactctaccattagtacttgttactaatgtgtgaatacttagtactttattagtccctacactaccaatttgttcaggcaccaaggtgccaaaccatataatacaatttctcccgtaagtccccaaagcatagctgcatctaggctataatgctgaataggacttttctaaaaactcaggaattgatgaaaggagttgaaagcagaaaggcaaagctgaaggataggtcctctgtaacagtgtccccaaagaccacaggctgtgcccccttccttggagttcgtctggtgaccccttctgagcccccggagaccactgtgttgcagagtctatctcatttcccccaagtgggaacccctttaccagatctctcctagccagagtccaggcctcttaaccacctctgggccccagtgaggaaggaaagtctgttttctctacacctgggctatgttacttcagtagccactaacctggggaactagctttgatttaaataaatttttttttattctcaagagcattttaagtgctcaatagctagtggctactgtcttattaaatggcacagatatatcgcatgtccatcatcatagaaagttattttgaatgaagccatgacaccatccatcttaggccttccttcccttcaatgtcataatgatctgaaaatgcaacatttccctcaaggaagatggttagtccctgaccccataggtgagcatcacagcctgtacttccactcacattaggcctcaaatataattttatttatctgctattgtccattttgcacactctatttgctatctaagcccctggaaagttgagatgccctagtcatcctctgtctctaggttttcctttggtccccaggtgcttaccatgtgcctggctctgtgcaagtgactttaacatgaacttaattctctcagtctttcagaggatgatttgtttttgctgcctgatagccttttttctatttaccttccttgacatattaatagagtcaccaaaatgttcagctgcatttcattcacctagaaggcaatgaatgtaaaaacatcaacaattctgcctgctacgaaataagtgctcagtaaatgtccattcccttctttacttctgcaggtgatatttatagtaataatgattttttaagttataatttattatccagcttctttattaggcattttacacttattgtcataacaatcctatgagggctaaagtaaaaatgtaataaaatatagctctctcccacatcctgtttttcatctcacatgcagattttgaattccccaagaacagacctgtgtcatcttacacattttggaatccctggagtatagcccagtacctggtgctgggagggactcagtatatatttattgaattcaaaaatgaatgaataaatcacttcttggccttcctgtccaccactcctggtcacccagcacctatacaaacctgctttcctctccctagcctatcaaaattcctgttacttcaacttgaatctctcctggtctaggagctgctttccaaactaaactcagctgcgttaagggagatggaaaaattcacaggatactaatagaattttagaccagtgcaccaaacccaatgtcagaggcagaggggcaagtttatttgagcagcaaggagactttgcattcagctctgtagatgaccttggaagacaggcctaggctaactgggctaagcctaggctaaaagtctatcgccaagctttgttcaaaattaagagtgttttaagcagggcctcaggctctgggctgtgaaggccccaagtgaccaccagaagatgctagaaaggacatcagctactggagcatggagaggaggtgagcctggctccagtaagagtgtggcaaactcctgatggttttacaagggtgtagggcttttggagactctactttggtttgtgtagtgatgcatttgcaaacatatgtttaaaatactaacggctctccacattcttagatttcacatccatggttttaaccaaccatggatggaagatatttggggggaaaaaaaaaacaataaaaaagaatacaacatagaaaaagaatacaaattttaaaatatagtataataactatttacatgacttttatattgtattagtcattataaatctagagatcatttaaagtgtacagagagtgtgtgtaggttatgtgcaaatgctgatttatataagggacttgagcatccatgggttttggcatcctcaggagtcttgtaaccaatccccatggataccataggatgactgtatattttcctcttattatacaaatcatgctttaaacaaaatacaataaatcacaagtgagaaaataaaaaccacttatagcagactttttttggcatttgaatgtttatcccaacagagaccacacacacatacatttcttttttattggtacatattttttaataggtttatctcctagtataggctcaacagcattaaagacaaagacttcttttctttcttttaagggttatgtaaacctccccatgaaaatggggatttgagagccttagcaaaggaatatgagttatgggaaagtagccatgtgtctattgcattaaacatattcttgttgccatggtgatattaacatttcaggaggaacaaaaccagtaagtttttgtaaggtgacagaatggaggagatgcatgtttacatagatttgctcttataattatgctgtgcaatctcatttctgccttttcctgaatgccacatcaaaggagaatctcttacatacattttttaaaggagtatttttatctgatgtccatttatatacttgaattcattgacatcttcccgtgtggagtgggatctatgttcctcacctacagaggtgccatttctaagtgacagtggagtgaggggaggaatacgtgctggactctggactcttatcttggctgtatcatcaatcactaatgtggtccagggcaagtcccttcatcacctggcctacagttattttagccaaatgagagagacatcagccaaccccaagcccttgtcctctgcccaaccaccttgtctgacagcaatggaggtagtcttcagcttccctccccctttcacaatagagtacatatgggacagtggcaaagtaaaccgcactgtcagaatgctggagtcccacactggccttgcagcttatcctggtgctcttgagtagttatttatgtttcagcctaatcatccatataatgggtccaatggtagaacctaatgctatcaatgtgatgattgaatgaaataatccacagaaattgcttaacacagtgcctggcccacaagacatgggcaagggctcaagacatggtgatggttgtcactgcttgcatccaggaggggacgctgtcactgcaagtcacgttcccctgtaaagcatgacgcaggtcaggtcgatggcaccaaggtagccctctaaagtacatccagaagtagtcaggaatgtggcttctcagaatgaattatgttgtttgtggtgctatttgtcagcatgagaaagtctcataataagaaataagaaataataaatgagaaataagaaactgttaattaatgacactgagacaataagagagccaataaaagaaatcatggaaattggaaggtttttcactttttctccttgaatatgtgccctgccgcctggggtgctgctctagaattgttgctctgagaacatttttaaatgacccgaaaaaaatcctattttgaaattgtgtgaaatgaagttctattaaggtaggagttggcaaaactcactttattcatttgcactttaaaagagaattattcattagctgtagaatttttatttcccccattcagtgaaaataacagctaggggctgccatgccccagactgatgctctgctaaatgttccagcacgttgtccacactccctgtcatcagacagtgcatttggatctgctcagatgaatcctggtcccctccttgagcactgcagttcttccacagcagtgaaaaaaacattgctcttcttcctctggtggtttgaagaatatacagaaagggcaaaggggtacctagagtgtagaggttagggttcatagaactgaaggattgcacaggtgtcagcccctttggacacaggcacgatcatttattggccctcttccaaacttaagcaagaagttctaagaaaataaattcagatagaagatcagcatggaccagataattggtaggaaaaagttgcaaagctagactgtgatggaaatatagaaatggggatcagctccaagaaaaggaggctgaagcccagatgcaggtgtgaaatgagactgaagatgaattatgagagtccagcccggtggggaaggggctcagtgaataccagcctgggctgtaggcactggccttgatcctgcaggtagagggagttacttattgcaggtctttaagtggatagaatgatggcagtagtgtataaggtgaattatgacacatatgaaggggaaatcaggaaactgaagttacaagctgtggctgactccagtcacagaaagaaaagtaccgacaggggcagcatgttgccccctagtatgatgcacttctacttgctgatgacctctgtggagtctggccagagccactggttttcagtggagggaaaaggagcatcatctgccttaaaagatttgaaaatttgtagaggaatttttggttgtcacagtggtggttggcatgtaatgggagaggcccaggatggcttaggctccttcaatgcatgggtcagtctcacacgaataacagtgtcccaaccgaaaggccagtgatgcacccatcagacatgctggattgaacatctctttacagccaagaaatggagcagtgaggtgtcccaggatgggaaggaagggcccagaaatccatggttggtctgagatgctcctcagaaagtgtctagcatcccccagcaatgcaccccagagagcggttggtcagaagaccctgaggctctgttcagctcccactgctaagactttgaaatacgaggtggaaaaaacaacacaaaattcaaactaatttagttaatagctttcatgtatcactgggtgccaggtacagtagcaagtatttcatttattattcataatttcatgaggtgtggatatgatttccattttatactaggaagcaagaagttccataacttgtacaaagccacacaaactagtggagctagtgctaagatacagtaaagacaataaaaaactgtgtagttcataatattgtaacatcaaaggcaatgtgtgtttgggctttgacgtaatccaatatcatcacaagaaaaccagaattgacagcagcctcttgtgttctggctggtgatttggtctctacctgggccaggcttgtgagataaattaaatacatttttgaatccctaaataatcgggctttgaaatggactctggacatttagaaacttgatgatcttatgacaaaagcatatgatatatatttcctggtaagaaatataaggcaggcttgtctctaaaaggagtgaggtccccttagtttaaaatataaaagcaggccgggtgcggtggctcatgcccgtaatcccagaactttgggaggccaaggagggcagatcacaaggtcaggagatcgagaccatcctggctaacatggtgaaactccgtctctactaaaaatacaaaaaaattagctgggcgtggtggcaggcacctgtagtcccagctactggggaggctgaggcaggagaattgcttgaacctgggaggcagagcttgcagtgagccgagattgtgccactgcactccagcctgggcgacagagcgagactccatctcaaaaaaagaaaaaaataaataaaagcaaatgttctaacagtttctaagtcaagacctctcaactggtttttcccagtttgtctcagccacattttcccatagattctgaatcattaactctgcactggggacttgcaatctgtgtttttaacaagttcctcaggtgattcttctgatcaggcaagattagaaaatattgaccaatgctatgttatgaaaatgtttctctatataaattgcccaaagttgagtcatggaagtctttaaaaatcatttacttgtaacaattatttttgtgttgataaccccttaatatagccttgaatttattttatgtcttacatcttacaaaacacatttaggtatagtccatcatatgaaattcacaaaaaatatacaattttatagataagtcagtgaggcccccatttgtcttgggccctactaagaataaagtggcagaacacaggtgtgaatccagaccttctaacacattttggtacgcctcagtgcgtgacctgtggagctggtggggcatgctgggttgtggggagagtcagcacggtgctcagtgggcagcctcattgcctcattctcgttgaggatggggtatcggccactgatggtagctggggtcttcatggcacctagaagagtagctccagctccttaggacatgtgtgctgcccacagataaagctgttggcacagactgactttagtatttccaaaccatctttctttagaaacttcaaagacattgttttcatttcttgacatgtttgaaactccagcatctaatttgttaaaagatcaagtgaaggcaagatacctgagaaactaagaatttcaagttaactgatatctcagaagcctgcaagagtgatttactttctgcgggggtaagaaaaaatattcaaaacagaaattaatttagttccaggtttgtcagaagtgatacaggagtatagaaaatttgtaatataaatccccattacttttttaagaatttttgatggcagaatgttaaaacaaaaggggatggactttttaattgaagttataaaattcattagaaacatttcaggaaatctaatatcattagatcaacatattctaaattgtttcaaatgttaaaataactttcctcaaagtagagtaagtaattgattcctccacaattgagttttaaatgcccctttccattcaactgctatatatatctctctactcatagatctttctagctgggaggggctttctttactgtaaaacagatagcaggctacttttgattgagctttgatagtgacatctttaaagaaatataaagaaaaaccatgagttcttatttaaaatgaaagagttgaactagccactcttttagacattaactatttttgctgtcactgaatatgctgtttccttttggctggaaattgtttctcggcaacattttctgtatagagactatgctacttggattcagagctggagctaatgtttgcccaagttaggaagagactcactatcaggatatattttctcttctgtgacccacaggaaagagcacagctttgggaatcagacagctcagggtcaaacctcagctctggtattttctagccatgttacctgtaacccattccagcttcactttgctcctctgtgaactgacattaatagcatctatttcatgtgttgttatggagatgaaatgagatgaggcatgtttcatagagcctgcacaaagtagaggtcccataactggtaattttcttccattttaattatgtttgttctcatgtcaaacaaatagtttcttggtcaaaatcagtggtgtccttttttttgtagcagaactctttttctaactaatttctacaggaattaggcatttactatgtcaatctttagtgcccccaaatttcttattttttatggaattatggaaactctgaaatgtagcctgaaaaaatatatatttaaaaagcatatatggaatactcattaaaatggctactatcaaaaaaaatcagaaaatagccggtcttggcaaggatgtgaagatatgggaactcttgtacattgttgatgggaatgtgaattcatacaaccacaatgaaagcagctcatcatttcctcagaaagttaatacagttaacgtatgatccagcagttccacttctgggtatatacccaaaataatgaaaagcaggttctcaagaggtatttgtacatggatattcatagcagcattattcacagtagccaaaaggtggaggcaagccgagtccaacagatgaatggataaacagaatgtggtacatccatacactggaacattcctcagccttaaaaagggaggaaattttgatgcatgctacagcatgaatgaaccttaagacattatgctggccaggcgcagtggctcacgcctgtaatcccagcactttgggaggctgaggcaggcacatcatctgaggtcaagagttcaacacctgcctagccaacatggtgaaatgccatctctactaatatacaaaaattagctgggtgtggtgatgtgcacctgtaatcccagctacttggaagtaagaggcaggagaatcacgtggactcgggaggcggaggttgcagtgagccaagatcgcgccactgcattccagcctgggcggcagagtgaaatcctgtctcctcccaccacaaaaaagaaaaaaataataaaatgctgagtgaaataagccagtcacaaaaagacaaatactatgattgcacttaacacaggtatctataatatctatagtagtcagattcggagacaaaagtaggatggtggttgtcctgggctgggaggaaaggggcataggcgtagctaatggctataaagtttttcacttttcaagataaaaggagtttggagactgattgcagaatgctgtgtacttaatgctgctgaactgtgcacttaaaaatggttacaatggaagttttatgttacgtatattttaccacaatttaaattaaaaaaatttttaaagcgtatattgaaaatcactgggctctgactgggtccagtggctcacacctgtaatcccagcactttgggaggccaaagtgggtgtatcacaaggtcaggagatcgagaccatcctggttaacatggtgaaaccccgtctccactaaaaaatacaaaaaaattagctgggcgtggtggcgggcacctgtagtcccacctgctcgggaggctgaggcaggagaatggcgtgaacctgggaggcagagcttgcattgagccgagatcatgccactgcactccagcttgggcaatagagcgagactccatctcaaataaataaataggaaaatcacttggctccaaagacccagtcatctgtaacatctaatcatgcaaaggtggaagagaatttgtaattaagggaggagatccaagatcagcttccatcctagtctttctcctctggcaactcctgagattgtgtgtattggctgagggtgtgtgtggggagaagcaggtgtgggaatctttaaatatggtctgctttccccctaactcacttgagaaccgaaggaagacctggctgtgccttatctgaattgttgatgagccatcctctattaattcaaagggagccctctgacaggattaacaataaacagccttgtactgtccttaaaagaaaataaggctcttgagtttagaacagatcccaacactcagagcctgacttcacaacaaacagcaaacatccaagcatttgctgctgcttcctgggaaggccagcactatcaggtgtctgatcaaatgggattagttggtctctctgagagcagtgaggttaaggaaatgtcattggcatcagtatcttcggtgtcagtctcagcaaatccagtatggacttaatctccttatccagaaagcatacagagaaaaattggtgtagaataagcaaacagttagcaaaactggaaaagagaaaaggactttgtctaaaaagacctatttcatttaattaaagtctcatgaagaaagaggaaaaaaaaaaacttacaatggtgatcatctttttttcttttttcttttttttttttttttttttttttttgatacagggtttctctctgttgcccaggctggcgtgcagtggcacaatctcagctcactgcaagctccgcttcccagggtcaagcaattctcgtgcatcagcctcccaagtagctgggattagaggcacacaccaccatgcctggctaatttttctatttttagtagagatagggtttctccatgttggctaggctggtcttgaactcctggcctcaagtaatccatctacctcggcctcccaaagtgctgggattacaggtgtcatccaccatgcccggcctagtggttatcttaataatgatcactatggtatgaaggaagtttctgagtttattttatacttgtgtcactaataataggtcatctaagtcaaatttttaaaaagaaatgtcctgcacatagtgtcagactaggaaggctggagtgttttcttatcagtctattcaaatattagaaattttcctgagtatatccttgaaatctcaaatccttatcattggaagttatcattgtttgcatatgttttatgggattcttaaggaatttaaaaacttggcatcctcatgaaaagaaataaagtactgataagtactacagtatggatgaaccttgaaaacatgctaagtgaaagaagccagtcacaaaagattacatattatataatctcatttgtgtgaaagatctagaataggcaaatccatagagacaacaagtaggttagtagttaacaagggcttgggaaacagagaaatgggaagtgaccacctaatggtatgggattcctttttgaaaatgatgaaaatgtgctagaattagatactgctgctgattgcacatccttatgaatggaataaaaaaatcactgaattgtacactttaaaatgatgaaaattatatgtcaatcttaataatgccattataaaaataaaccattagagaaaactttcagtggaagataataaaaacttacagaaaatatgtttttatactcttaagaaaattaaagggaacagaaattcagttctctaattttctacattgtatcaaaacctatatgactggttttttttttgttttttgttttttagacggagtctcgctctgtcgcccaggctggagtgcagtggcgcaatctcggctcactgcaagctcggcctcccgggttcacgccattctcctgcctcaacctcccaagtagctgggactacaggtgcccgctaccacgcccggctaattttttgtatttttagtagagacggggtttcaccgtgttagccaggatggtctcgatctcctgacctcatgatccgcccgcctcggcctcccaaagtgctgggattacaggcgtgagccaccgcgcccggcccaaaacctatatgactgttaaatagaatttatcaaacatttattgattaccttttatgtgctggagagttagcagatgcaacctcttccctcagaggctaaaagagttttcaaaagatatatgtttatagcgtgaacaaggatggtagtaatctttgcttccgtgtatttcctgtgctttctctgtgaacgtattcactaatcatttttccgtttctatatatactagaaataatgccaaagtataagaaaatagaatgagaaaacataaaaatcttaaaatgtatgtgttttaaatgtaaatcacacactgaaatctggatcttcaatttgttatgccacttcgacttattttttaatcataatagtaactttgtgacaaaaattatgacaagtggtaagaattagcagaagatactggattccatctcaacttttattattttagaatttgtcttcagtgggagcatgtcaaggaaccaaactaaaaggctgtataagttaatctttcattatctacaagattttgagtgatatcatccacttaactcttcccttaatgataacctctcccagacatttttaaagaagagatgagacatgggagggttgggggagacatcagtaattcacatacatccttttcgtatttaaatgaaaagtttcccatttatcacaagtaatatagaaaatggccctgatttcactttgggcagttgcagacatgcccctgttttgatgattatttcatgaaataaatttggctgggtttttcagaaacactgagaaagaagaaataagcaagcaattccacatttcccagcagaggcagttgtttttccaggtccctgacatcaatagtacccatatatttctatcatattctatcatgtagatcatgttatataccacatatgtctatcattttaaatcaactccagctttgcctgagcttcccattcctctcagctgctcctgatcccagcatggctcacagacacagcctgttctgagctcatgctcctctaagaccctttgcatccctcataagatccacctgatttagtaccttatctttcaaggcttactttagatcgccatgtcttttctacccaaattatttcataatatccttgtgagatgcagtcatttcatacatttctaaatgtctgtataataagtaatacaaataatataacatctaattgttataatgtttactaaatgccaagcaccattcttaagactctacacttactaactcatttatcctcatgacagtctattgtcttagtccattttttgttgctataacagaataccacagacttgtaatttataaagaaaaaaatttcttatagttcaggaggctgggaagtccaaggttgaggggctgcatctggtgagggccttgtcaagatggcggaggacatcatatggtgagaacaagagtatgcatgtccagttcaggtctttctcctcttcttataaagccaccaatcccattgtggaggccataccctgatgatcttatctaatcattaatccctgccaaggaccctaccttcaaattccatcaacatatgaatttggagattaagtttctaacatataaaattaggggggcatattcaaaccatagcaactatgatatgagtaagtactattattagcctaattttacagataagagatctgcaatacagagaatttaagtaaacttacctaaggttaattagctagtatggggcaggcctggaatttgaacctaagcaatctagcccttaaccactgtcctgtcctgccacaatgcaatgtttctctcttaacacactcttaggtgctccaaaaatgcaaaaatagtaagacataagtatatattagtacactacaaagtaagtacggtgacagcatgacctggtctagcgaaaaaaatatgaacttggggttagacaactgatgggagctttgtgacctttggcaaggtattttcatttttagggtcttcaaaaaatcaaatttttcagattttcacagatttcctcatctgtaaaataaagaaaaacattcgatagtacttctttctagggttgttgtgtatattaaatgagacaaaagatatgaaatacctgtgaatgtccttcttttaatacaaattatctcatgtctcctcttgacacccctgtgatggaggcagtggaggtattgtatccaccgcacagatgaggagataagttcattaaggataaggcacattctcagtatcagctctcatgaaagtgggtgtagaagagtgagagtggggccttgtcttctcattcctgatgaaatgtgcttcccactagacatatgctaaggacaggactgaaataaagttataaccaggatagaatttctccccctacccaattcattattaaaatttttctgtacatttctaagccagttttatagtttaggaagtactgtaaaaagtcatctttatttttggagttagatgaccttttaagagttattctaaagtatatcatatgatataatgtaacatataataccatatattactgtagagcggtgtgatgaagttgtaaaggaatatattgaatttttacaaatcataagtgatcttagtttgttctgggtgatttgcttctctttttcctaaaagtagaaggcaaaatcttttctaaattggaattttatcctctaacttcagttgtaggggccttccaggagtaggttagagactaaaaaccttgtctgaaaatcgaggtggaaggagatcctcatggaagaaagtgaataaactacaaaagaaaaaagggctagaaatggtattatacataagaacaaaaatccacacattagaggatatagcagtgatccatgttgttttcttaagtacttaattaatttattggcctagaaatttgagagaattaaacttgctgtgtactgtaattttgctcagtcaaatttctgaatatttatccaggtctcattaatgctttatataaatgtatgtatagccgattccctttgttgtttataaaatgcatctgcgtatacatgtgattccctttttgtctttatccaccatttttcaaaaaggattaaggagaagtaaatactagagaaaaaaaagtattggttaatcatatgtatacttaagttttttagagtgaataaatattaccttgagtagtttgatgggaaagttaagttaaataagatgctattgtgccggtgatgaaaatagtggtttataaataaacccaaagagtttagtgaaatagaaggggtagtacctgggagttgggaaacctggggtcttggccaagcaccaagctctgtgactccatgtaaatcacttagcctcctccctggtctcttccttacctgtaatataggtgattagactgaatgaactcagaggtctttcagaaacttcccaaatgctaatgtattctataacattttgaatgaacaggaaaaaatttatttggtacaagaacaaacattgtattaagaaactaatatatataaaattacaatcgtatttacttttttgtttgaactaaatcaggtcaaattcaaaactccaggttgaatttgtttttatctaaatgttaattcatgcttcttctcacaaagtgcatatagatctttaattctagccatacttaatattctaccttaatgggaaaaaaaatcatcatatttttaggtgcaggatattctcaggttccttcaaagtttacatattagggaagttaatggctaagttaaacctctctggggcattcagagtatagaaagcaagggatgagagttgaaacagatggtggtagtgggctgcaaataggcaatattaaaatacaaccatctttccactgtacaaatgtacatgtagaaattttttagaaaagcatgaagaagcaaaaagtcatctataatctcattactgaaagaaattgttaacgtttggattaatatctcaccaggcatggtggctcatgcctataatcccagcacactgggaggccaaggtgggcgatcacttgacgtcagaagttcaagaccagcctggccaacgtgatgaaacctcgtctctgctaaaaatacaaaaattatttgggcatggtggtgagcacctgtaatcccagctactcaggaggctgaggtggcagaatcacttgaacctgggagatggaggttgcagtgaactgagattgtgctactgcactccagcctgggcaacagcaagaccgtctcaaaaaaaattgactgggtgtggtggctcacccctgtaatcccagcactttgggaggccgaggcaggtggatcacctgaggttggcagttccagaccagcctgaccaacatggagaaacctcgtctctactaaaaatacaaaattagctgggtgtggtggcacatgcctgtaatcccagctactcgggaggctgaggcaggagaattgcttgaacccaggaggcagaggttgtggtgagccgaaatcatgccattgcactccagcctgggcagcaagagcgaaactctatctcaaaaagaaaaaaaaatatatatatatatatatatatatatgtgtgtgtgtatatatatgtgtatatgtatatatatgtgtgtatatatatgtgtgtatatatatatgtgtatatatatgtgtgtgtgtatatatatgtgtatatatgtatatatatgtgtatatatgtatatatatgtgtatatatatgtatatatatgtgtgtatatatatgtatttatgtgtgtgtatatatagtgtatatatgtatatatatgtatatatgtgtatatatgtatatatatgtgtatatatatgtgtatatatgtgtatatattcacacatacatatatatttggatcaatatattttagaatgcatatatatttatgtataaaaatttatcttatttttcatagtttgatatctttaataatacatccatgttttccatgtcattaacttatcacagtataccttcaaatatggtatgagcctgacaacagtatagttccagtttctccttttcatctatgtgtggttgttgtcatacgttttacttttgcatatattataaaccccacaatttgttgtttttgtctttactttggaccatccgttatctcttttacttaccttcattttttgccatttccagagcccttcatttcttggtgcaggcctaagtttctgtttactgtcatattcctactatctgaagaactgaacattttatgtattgcaggtctgctgatgatgaattctcttagcttttgtttaccttaaaaagtctttattactccttgaaggtattttcatttggtgtagaattcttatttgacagtcagtatttaaagatgtcacttctttttttctggattgcataatttctgatgaggaggccactctacctattatctttgttctctgtatgagatgtgtcttttttccttgggctaccatcgagattgttcctttatatttcattttcagcaatttgactattgtgtctagttggagtttgtttattgtttatcttgcttggcatctcctgagctttctggatttgtatttttctgcctttcatcactccaagaaaattcttgaccattcattatctcttcaagtatgtcttctgtcccattctatctcttctccttatgcagctctcattagctgttttgtatcatcccacagctcttggaggctctgttctttcttttccactcttttttctccttaatgtttttattttaaataacttaaagtgacatatctgtaagttcaatggatcctgcctcaactgtgtgaagtctattgaggagcccacaaagcaatttactctgatattgcaatttttcttatcaaatgtttccatttgactctttgctaagaatcccatgcctttgctgcacttccctatttttcatgcatgttgttcctactagatagaacactggatattgtgtgtaggaggggagagattgagttaaataatatttttacctggaaatgagcatactcatactttttcttctgtgctgcaaatgtgagaggtggagcctgttttggcaggagttgagctgagtttacattttgtttcaggcttcagattcctcagtggaaggctgccattgctttctgcttggggtggagtctggggcatcagagaattttgcttagtgttagtgctccaccctgagctttctctgcacacctgcagcacagaggaggtctccccacactcctgccttacctcagcagttgactactcttgcttgttactctgtgctaggctagtgctaggggttgggggtctttcatgtaagctcagactcagtctttagggtgtgtgtctgggttcaaggctgtgtctttctccacattcctgccctttccaccacagcagccaaactctgccctgtatgtatggtgacggatttgaaggctctttgtacagactgccaaattgcattctagcaagcatgtacaaatttacatttcaccagcagtaaatgagggttctcttaggcaggctttcgagctctaacatcactgagtttctttgatatgttgggatttcttaactctgttgcttgcttagacagtggaagtgcagctcacagcgttactcatagtagggcatgatacatttttattggttagctgaggaatcaaaatatgagtagtccgttgagtggccctgaggtaccactttcattttgatttgtttctacttcacagaggcatctacgatatgattcaggagtaaaaagtgattgcattttattggaagctgcatttgacagagatgagaagctagggtttttaaacaaacgtcttctgaatcctgcctgaaaataccacagcctgagggtctagagcccaaattctgatcctgattctgcctctgattagctgtttcttaatctgcaaattaccagttctgtgcctcactttctttatccaatagggttaatgatatttatcctatttcagtggattgctgtgagggtaaaatgaaattacagaagttcaggtcctttacaacgctgtttaagtgctgtagaatataaagtatttctctaggaagggccagagaggtggagaaaatgtgagaattagaaactcaaggcacaccagcatggcacatgtatacctatgtaactaacctgcacattgtgcacatgtaccctaaaacttaaagtataataataataaaattaaattaaatttaaaaaaaagagaaaaaaaagaaactcaaggcacctttttgtcatctacacatccacagtatgagagagtgcatgaatatggaagagagtgaaattagaaacagacttcttcctcttactaaacttagcctgtttgtgataaaggttaattaagtctttctcaaccagtgagggcatagttttaaagggaaatggcatgccagcccttactcacactgggaagtgatgaggtcttcgtgtcacgtcccacttggggctcagtgagctctcctattggtcggtgtttcctttattcccaacctgaccctccatctgctgtctcagctctagaattcatccactgtgccgcttgggtcactagagcaatacacacttgtactcagaaaacagacataagcagatctgaaagtcgtcatgaaatttatttccttctgccagctttcactcaaaccaaatagtcctccacaccaaaaaagaccacagcgtgcccaaaggcacagcctatagtttcacttcctcttttgtaacctgttatacacagtcgaaagctgtgcagctgcaagctggtaggtctggagcaggggtcagcaaaccactgcccacaggccaaatccagcgcactgcctgtttttataaataaagttttagaaacacaaccgctcccatttctttacatattgcatgtgcctatggctgcctttgtgctgcaatggcagagttcagtagatgcaagagactgtatggcctgcaaagcagaatatatttgccatgtggccctttgcggacaaagtttgcctataccctgggtaacagcaatattggtctgtttactttccaccagcattactaagagaaatttgttttcctcaggtctctttcttctttcatttaagatttatattttagcatctaagaatagtgagcaaagagaatgtgcaacctttccatctgtggaaaggttgtaaacctaaccctaaccatacaaccattaaaagcatttaactagaaaagtttacataaaatacagggagaaaaggacatgttaaacaactccccatgaggactcaatcagtcaaatccaggtgtggaagagtctacacaataaattacccagtttcttcaataaataaatgaacacggggggaaaaaggtgggatagaggagctgtggagattaagaaagacttaaaggactcaacctaatgcaatatgtcgaccctccaacttgagcaaactaatggagatagttggagataatgggagaatttgaacatggagggggtcttgggtgctataaaggaattatttttactttcttcattatgataatggtatcgtgattttttgagatgtcctcatctgttagagataattaaattgcagtatttatgggtaaaataacatgatgccaagaattttctttctcctcttcttaaactccttcagaaagaaaaaaaaacagtagggagcataaaagaaataatattggctaaaggttgatgtttactgaaccagggtaaggagcacttgaagttcattatgtttttttgcccaaactttgtgtatgttggaacttttcattattgtgttttttaaaatcatgcattcaagagtttaagtgttgaagagttgaatcctggttctgccaactgtttctgcatgtgtaaaatggggattgtaattcagattatgtatgatgatatgaggattgtgagaattaaatgaagtagtaaagagtttagcatagtccctgacatgcaggaagtgatcaatacttgatagctactatattgtttctgttatcgaattataaatacataatccctgtgagcctagttcatttatgatgtaattgattctttgtgaacagcagaacttaaactcatattgctgctacacaagaataagaagccaggcatggtggtgcacacctgtagttccagctacttgggaggctgaggcgagaggatcgttggagctcgggaatttgagaccagcctaagcaatataacgagactctgtcacttaaaaagaaaaaaaaaaaaaaaaaaaaaaaaaacaagaaatcagggaattgtttttgatgtatgcgtacatttccttgacagtctggaaataatcatagcgcctgtaagatgcttggagagaagaataactatggtagcctaccactgaaatcaaggagaacacaattagaatttcagataatcctaacaatctggttattcttcaaatatttgtcaaataagcattacagttttcatgagactgctaacaaatgcctgtaaacacatttaagcaccacgggcatgggatgttatgtgactatgtatagaagtaacagattttccagtttgagttcctattgtctctccttgacaacctgatgctcccactggaacctgggaaaggctccaagtcacatgacactcttttaaactgagtctgtactgacttaatcagctacttgttagtcaaccactcactagccagtatgtatcactcaaattatagaaaaatacattgacttaaaaatgcaggacttttgagcaaaaaaacaaattatcacttcatccatcagtcacctcaagtgattgaaataaattaacttggaccctgcctcacagattcccttacaattcattcctttttaaagtctccttctgaagaaaattcctgtcagaagtattaggaagcacactgttcataaaggatgtttagaaaaggagagggggaaatggggatatgttgggggaagtttagaaaggaacgttttgttgaaaccaaaaatatcaaatctgtactttttcctcttcttcccagaatgacatcactcctttacatgttgcatcaaaaagaggaaatgcaaatatggtaaaactattgctcgatcgaggagctaaaatcgatgccaaaaccagggtaagtgtgcaacttatgtacctgcttctacttgtattcaggaagtaggaatacttttcctgatacctttgcactgatacaacatgagctttgttttctgttctatttgttatagtctcttggaaaatgactgctacttttattctttttaaaatggtatggccatccatctatatttataaatacttaattcacagttaaatggtacctggctttaaaagttctagagttcttgttgcatttaattttcaagacactgtaagctaagctgttcggtcagtttgatactaaaactgcaagttattctatttagaaacaaatctgtctactcttgtgcactgctggtagaaatgtaaaatgatgtgactgctatggaaaacagtgtggagcttcctcaaaaaaaattaaaaatagagctaacatatgatccagcaatctcacttctgggtatatgtccaaaataattgaaagcaggatctcaaaatatttgcataaccatgttcatagcagcaataggcaagaggtaaaagcagcccaaatgttcatggacagatgaatgaatttaaaaattttaaaatacaatggaatattattcggcccttagaaggaaatcttgttgcatgctacagcattgatgaaccttgaggacattatgctgaggtgaaatataccagtcacaaaaggacaaatactgtatgattccacttatctgagacatctagaatagtgaaaatcatggaaacagaaagtagtatggtagttggcagggactgggggtagaggaaatagttatttgatgggtatagagttttagttctgcaagatgaaaaagttctagagatctgttacacaacagtgtgaatgtggttaacattattgaagtgtctgcttatggattgtgagggtaaattttatgttgtatgtattttaccacaattaaaaatttttaaaggctgggcccactggcttacaactataatcccagcatttttagaggccaaggcaggaggatcacgtgagtccaggagtttgggaccagcctgggcagcacagcaaaacctccatctctaccaataaaagagaacaaaattaactggtagtggtggcatgcacttatagtcttggctgtacaacaggctgaggcaggaggatcgcttgagcccaggagttcaaggctacagtaggctttgatcacacctcagcaacagagtgagaccctgtctctaaaacaaaacaaaacaacattttttaattaaaaaattataaaaacccacaaatatgtctaatctaggtgtttatgtcatgttgcttctttggagtgatgcattgtgggtaggggaaaaaaccaagacttagaatttgatttgaatccaaattctaaacttagctagctgacttaggtaggctatttaactttactgattgtcctttctctatctgaaaataaagaaaattaatggccaccttgtagggttgttgcaaagatcaagataatgtttgtaaactgtgctggcataaagtagggcagaaataaattctagccactgctagtatatctcagagctccagttagtattaaagttctagccacgggttttcttattcaatatttcttgtgcaagaagcaatctaatcaaaagatggtctcacgacaaacatccatctatcgaagggttttaagtagttttcttgtaactgcaactcctgcaatcctgtgcttccttcttctaaaaattctgattccatgatcctaaaactggcctggtaacctcagcttaatttctgtagtgctttgatttactacttcattttttattccttgcatttatttactcaaccaatagatgatcgtcgagtgtctactgtgggccagacatagcaggtgacagagcaagacaccacaacacttcccctgcccttatgaaacaaaaggtctagtttgtattctgtactttgaccctaagacagcccagccataggcaggagacctagacttctttttcttgattaccattgaacctggaaaccatgtatgtaccttaaaagaaacaaactttctaaataggaaaagggaagaaaggaaggccgacccctaaatgactgtcttactggagaggtaaattgaatataggtcttactgaactgattttgcatcattccagtaagaagcaattatcagtatgtaaagaatgctagaaccattgctttaaatggcaggggtcttctgccatttaaaaagcgcaggctatttaaggagttgtaaggaataaaaagtagagatgcattgcatctgttgcctgattatcacatggagaaaaaggaacatttgtaaagaggaggaatctttgcaaagggaaatgagggttaccaagacacgcagaaaagagaagcttgaagaggtgcccggatatacagatttcagttggcatatggattggaaattaccttatttctctctctggtgatatagtcaatcaacagaacagcaaaatgatttgtcagtcatttttcatcatttgtcaaacacttacatgtcctatttcgttcaatgggaggagaaaaggatacataggaagttcaggccccatctttagagggcatagagggtcacaggggagggccaggagaaaaacatacaaattcctctgatgaaagtaccaaatataggaaataatctacataggcaaagtttggtgtgcaacttggtttctgtgccactttgcctccctgttccgaagggctgtcttattttcgacaaagatacagattcctttgtacctcccactcagttttgacttggatttacattcctcctgtattatgtgaaggaaagacatggagaaccagagaacagaaaagcctgacattttcttctgcagttgtcctgaatggaatgggttgggggaagggtgtcagttgggcagactgaatttctggcagactaaatgggagaaattatagtatatacctgaaatatgtaaactgttttgtgttctcttcatcaaaatgtcccttctctcctgctgaaatgatgaagtagtgattgggtgtgtgggtgaaagggaaggagcgggctaaaatgtcagaaagccatgggggcaagcctaaaaatagaaaggagaatttgtcacaaaaacaagttctaactacccagtccggtagcccctgagaaaatagataccgttatctatccatctgcctcccaccaagtacttactattgtggcaaccttgcttgcattcaataaatctgatctggtacacacttatcccccgtgttttagaggcaggaaagcatcactggatttcacctcagaggacagcactgtaagggaccttgttcctattgctctgtgccctgcctgggtgctcacagaatagaggattcagtttaaaagaagattcttagagctctttcattcaaggatgtaaacttgaattgtgttcagtgtaatttaggtaggatcagagcaagatattaccagctggaaaggcagatgagtgaatttaatttcaccctagtgcctgatctgtaatcttaagtgtgactagcaagtagtgaaattgtgacctgagaaaagttcacccttctgagtcatagttttccagccagtacagatagaaagttgttcctgaagatctcactctctcagctggaagggcactggaaattgtaactttaagaataattagttattgtaaaatttaggatgattgcacatgaatcttcttagaggtgtttagctaggatatgatgaattacagacccttcaggtttctttttttttttttttttaagatggagtctcgctctgtcagtcgcccagtctggagtgcagtggcgcaatctcggctcactgcaagctccacctcctgggttcaagccattctcctgcctcagcctcctgagtagctgggactacaggtgcccgccaccacgcccggctaatttttgtatttttagtagagatggggtttcaccgtgttagccaggatggtcttgatctcctgacctcgtgatctgcccatctcagcctctcaaagtgctgggattacaggcgtgagccaccgcacccagcccccaaacccttcatgtttctatttacctcatttcaggaaagtctttcccattttcccagctccataatgctaattaatatcaactggcttgttaactcatgttcctgttgatagtaagtatatagagaatctctgtcatagtggtgggacatgtgctgagatataaacacctatcaaggcatatttgtcaatctggtctatatgcagctttctaattttaaaatgatttatgtagttcattttttcaacaagatcacaatggcttcgtttctttatagactaaaatgttttgctgagaatggcccctatttctttccactgaattcttccctctttaaagctagcgtgagtatttggtacatgttgaaggaagatactttgcagtggatggtctcttgtcatttttagtttgctctgcatcaattcacagaccaatcagagactcaatatagaccctaaatccgaaccattttgagacttgagttctctatctcttttcactgactcctctccatctaataataaaagcagctatacttgtatttagtgcttcagagaagatgcagaatccccggtagtgttggtaataacaatactctcattgccagaatgttactctaactgtgcccctcccaacttctagcctttctagcgagttgccactgcctgcatcctcagagaaacccattaccacagtattatttgcaaagctacaccttaactctaagatgcacgtggtcatcttagtgtctgccacacttagcatacttagcacacttcctggtgcatattaaatgcctaataagtgtttgctgaatatattgaaataagatatacttcttaatattacatttgtcaaaacatcttaatttacttgactttatactggtcctatggtaacgtaatttttccactgaagttaatggcatccggtttatgtacaagaataaagaagtatttatgctcaggtagatgaagtgttttcaaggcacttccaatctgtcaattgttaaatttttactgcctgggaaggtgtcaggggacatttggatgtactataatttcagcccatgctttcccagaaatgtaactgattctgtttctcaggttaaatactaagaaaaaagaattattgatactgacttttgcttttgattatatttcaagggatgtgattgtccaaagttaaaaataaatccttgaataaaatattaaatatttcaaagtcatagaatagtctctctgaaaaagaaattctaaaacagtacttcctccttgagttctaaaatagatatgttgacaagaacattagaaatagtgaagaagaccctgggtttctatattagttgaaactagcctgaaaatgtttcttcatgtcatataaaaatatatcaattttttcatttttatgtcaaaaaattacaagttaattgaaaatatttatttagattaaaagaaggaccagtaatcatgaaatgccactagctttcaaaacacgagagaatatctttgaaggaaagaatgttttttacagttgcaaagcattctgagaacatggagggagcatcttttgttttatttttctccctctcctaaagtttttacactacattgtaaacctcatttcccttgccaaattagagatctaaaagtattatggcaaaaatcacaattgttgttgcaccaacctaataaatgtcgtatgcctggttctgttgaagagtcaacaaaataggctcaggacagttttattttagataattgctatgtggttccaagtgctaatggtcagaatgttgtctgctttttctcctactgtttcttaatgtatgttggtaatgctcacatctaatttttttttaaatagctctacatcagttagacacaaaattaccctatagctgtcaactataaccatctttaattaccctccttcctcaaaggaaagataaagataaaagaagttattagtgttttgtaaattatgaatactaaattgtttcaaacatgtaacatcttataagaagcatataaaagcacctttgtatgtttgaaatcttttttttttttttttttggagacacagtctcactctgttgcccaggctggagtgtagtggcgcaatctcagctcactgcaacctccgtctcccaggttcaagtgagtctcgtacctgtctcctgagtagctgggattacaggcacacgccacctcgcctagctaatttttgtatttttaatagagacggggtttcaccatattggccaggctggtctcgaactcttgacctcgtgatccgcccacctcggcctcccaaagtgcaggattacaggcatgagccactgcacctggccaaaatcatattttatagtaggttattcagtatctaccaactggaaagtcaagaattctctcatgtattcatagaagaaatattcgtaagtggtgcatgatagaaagaaatacaaactatgatggcgtaatatgcagaggtcacatatcctatttttattcaaatatatgagagttctggcattaagttatgatggaatagcatgcattggactaagccttctgctgggaaaagtcatcagctctggacaaaaccaagctgctgtaagttccaaattatttataacatatcatacataatacccagtatgtaattttaaaattactaaacaaagtcaactggaaaatatgaccgacagtcaaaagaaaagttagataatagaaacaaacccacagatgactccactgttgaaatttgctgaatttaaaataactaagataaatatgttaagctataggagaaacgagtataatgcgggggaaagaaccagatggaaatcctaagattgaaaaacacagtatcagaaatattttaaaaatcattacatgggataaataacagattgaatacaaaggaagaaaaaaattggaggacttgaacacaagtcatagaaatcatccatactaaagcacagaaagaaaaaagattaaaaataaaatacactgctatgtcagtaacctgtggaataatagcaagtcgactaaatctatacaatgtagtccaacaggcaaaggagaaagagaatggggcataaaataagtttatatttacttccaaatttgatcataaactgcagcactcaaatcaaggaatcttagcctaccccaaagaggataaatacaaagaaaaccacacagagtcatatcacacaaagagtcaaaaaatcaaaaagaaaaaaatttaagtagccagagaaaaagacatatcatgaatgggaaagacaattataagaatgttatctgacttctcatcagaaacactgaaggtcagaaaatgatgggccacctttaaagttctgaatgaaaaatatctagcaatctacttacatagattgatataaatatctagtaaaaaaggtatttatatctactaaaaattatatttacataataaaagcaaaacaaagactgtttcatacaagcgaaagctgacataactttgttaccatcaggcccagacgaactaaaatactgaagaaatttcttccatctaagggaaatgataccaaaaagaaaactggatctacataaaggaaagaacagctaggagtaggaaatatgtggatacaataaaatattattcttcttaagttctttaaaagtcaattgttgaagcaaaatatcaatctattgtgaggtctatgatatgtaatagtatgtagaaataaaatatatgctatagcacaaaagataaaactaacagtgtaaatataattataatatggcagaattcttgttatacataaagtggtatattaattcagtatatatgtaatattaatattactttataatatactatttatataatgaatactatgtattatatatactatataatatagtatattatgttatactatattatactataatttattatgatatattatctatactatatataatatatagtgacttttgcttttgattatatatagtatatatacatagtatatatacatatactatgtatatatactatagtatatatactatgtatatatactatagtatatatactatgtatatatactatagtatatgtatatatatagtatatatactatgtatatatactatattttatagtatgttatatattatatgttgtatagtatgttatatatgttatactatattatactataatttattctataatttactatattatatagtattacatatactatataatatagtatatatacatagtatatatagtattacatatactatataatatagcatatatacatagtatatatagtattacatatactatataatatagtatatatacatagtatatatagtattacatatactatataatatagtatatatacatagtatatatagtattacatatataatactatatattaccacatatagtatataatatataatatatattacagtaaatactatttagatatatactatatcctctatattatatataatatatactatatacactctctattatatataatatatatgatatacaattatcttattacattataggaattacaatttgtaatattataatattcacactagtaagttaaagatacacattttaatttataaaacaactatccccccaaaaaaaattaactaaaaaaatcagaagacagccaatgatatatataatgtttcaatgattagtatactaaataattccagcacaaaaggagacaagcaacgagggacaataaacacaaagaacagagtggaaaactacaatacaaataacataagggtgtgttctagtctcagaatgaaggctgtagttttccaagtagagaggacacaaaaggattttaccttattttcatttaaacatataggcggtatggcagtagaacaaggaagctaattaatgtattttccctcctatatataaaaggcagaaatgaactcttaatcttaaatagaacattgactgcttatattttttgaagaggttgcttggcatagtagaaggaacccagtccttccaagggaggcaatcctgaatgtaaattctaattctatctatttactctatgtacttgccatgtgaccttgagtaggtatatgaatcccctggagaagttttctcatctataaatgtagctactgatgcttttctcatagaattgctgcaaagattaaataagatcacaattataatgtgcctatatcatagaggacattcaaaaaattttatttcacctcttaggctatctcgataactgcctaacacaaaaaaaatgaggacacagtccaaatttttggtgaaaatgccaatatggaatagctttgctggctgggtgcggtggctcatgcctgtaatcctagcacttttggaagctgacgtgagaggattgcttgaggccaggagtttgagaccagcctggccaacttggtgaaaccccatctctacaaaaaatgtaaaaataactggaaatggtggggcatgcctgtaatcccagctacttgggaggctgatgcatgagagttgcttgaacccagaaggcagaggtgacagtgagctgagattgtgccattacactccagcctgggtgacaacaagactttgtctcaaaaaaaaagaaaaaaaaaagaaagaaaaagaaaaaaagaaaagaaaagagcttagctattagactgtaagtgatgccctttagtttatctttcactatcatcatagctctcttctcttgaaggactctctacatttttttcattgttttcagtttttaattaaagattatatcctgttctacagccatgatctatctgcagagttctctctgcttgaattccttttctttctctagagtgaggagtttgtatttatttatttattttgctggtgaaaaagaaaagaaagagtatcctaaaggatacaaatcaaaataaatatgtctcttcttgaaaatatttcccaaaccacgaatttgtgtcacttcagtgacactgagcaaatttgacctgctaaagacacattctggtttcatagtcctaggtgtgatgccttaacatcctgcttcatgcttttcagaaaaatcagaccggaaagtcttttgaccttcgcatgtacaaggatttgctcttaggctaacatgagagcattctgtccggcgagtaacgtgcagttcccctcctcactaataagattactgtcactaaaatgaaatatgagatctggactagccagtttgtgttgctttagaattctgcccaagggaaacttgttcattatgtgagtgctttaaaaatcaagggaattggaaaatattactaaccccatgcaatttcatttcccttccgtaatgttactatggcaactcagcatccctctcattctctcctgtccaactgcatatgttgcctttcttgaggcaccccctccctcaatcccccgaaattgcctttgtctagcatttttcaactggagatcaacactattctatgcagttgaaaaactgctttttggtctccagctcattctaagtgactttgttcattaattatacatttctaggggttggaggcaagtaagaatccttattccgcttcaaaaaaaaaaaagcgtggctctaattttagggaaatgaatatgccagttctctgctacattgcaaagcacagtatcaaccatagctcttttattacgcttattagtattctgagtagaaaaaggaaatcttatttagaacaaattctgaaagctaagagacttagtcacatccttaaatcaaatcccaatttacaagtcacttattctatcgagaattttacttttctggaaaaataaggtattttaatagtgctactgaagtagacaaaatgagtctactcttaaacaaaaaggataacaaggaaaataattttaaacaactaactagaaaatattttttttcactagcctgaaaacacattcattcactcactccattcattcatttactcagtaatttttattaggcaactttcatggacatagtactaagttacctcctctgtaagattcatttatcccttaagctggtaatcttgtcctcagagataaactagtgttaaattaaaaaattattcatgatacttgtaagaaaacagtaaagctgactttatccaaagggggctactacaaaggaattttatagtagtaaagagatctagctcaactctgaatacagcaaggaaaggtgggaatttatagccaaggagtagggttgaggtcagtaaatagaaaattactaagaggaaatgtcaagggtaggggcacttctggctaaactgacttgacaagattattgccaaaggcaggtcagattgataagagtggcagggtgggagataaggaatttgatctaatagaaagggttgggattttcattaaactgatccagtaggagtcttgctaaaactgaactaagcagacactaacatatggaaagccaaaagtctagatgagaagagaattcagagaagcttgactagagttaagtcaaggaagagcatctttgtcactggaaatattcatgtgtgcccacaggtaaagaaaatactaggtaaaaagttacaggtcccccaaaagaggtatagaaaataagacaggagtctggaaggtagaaagattccatttaatttgtgaaaagatttcaaagaaatgctctgctctaagatagtaaggatcctgtaggaagtgggaaaggaactctcaggtacatgaaatggcgtgggcaagacagtaaaacaacggagggactcttatcagaagctgcagagagtttgttaattgcagtataagttaagggaatcaggaaaggccaagttggaccaagtatagcaggaactgattttagacgactttgaatgctaacttgaagaatttagacttgactgaggagtaactgtgaatgacagttagtgaagatcattttgaacagaatggcatcctaaatcagaaccgtgtgtcaggaaagtgagtgataggccacaccagcttcaaagccaaagaaatgagttcaaaatttatttttttaaccaaaaagtggagtgaagtggaacaaatgcctgctagttttcctcctcttttttttttttttaactgaattaagtgtgaatcattaaatggcaggtacttttcagtcccactgtggatcagctggtcttgcccatcttcatgactgcaagaactgtgatgctaattaaagatcttacattcaccctaggcactcgttttccactgacctgtcaatgtcccagcagctgggccagcgctgcctgtgcagccaggcagtcgcatcattgatatcttgtgcagcttcctgatgaggcatccctcctgcagcaattttggctacttgaagagctacatgcctttgaaaagagctagactgaatctgtagaagatccaaaggagactgacacttgaagtcagtgttcagaatactacaaggaaaactacagttgaaagagttgtgcttcaggtagctctttgcagttcagctagaactgatgagttgtaccttggggaaacagctgactttgtcatggaagcaaggtgattaaaggaacaatggctaaagaatataatacttcacagctcttccactggtgaaatgtcacctttccctactgagtctttagatgccacatgttgttagtaaacaaacatcagagatcagaggtagcagcttctgaatgtagctaagggaaggctaagagtggctgcaagtgtgagcacagggactttgccttagtaacccctctgaagacatgccttgattgtcttgtagagccagcactcatagtccaagcctcgttctaaatttggtgcgtgcagccttgaatgagtaatttcacttctttgaaccttggaatctctatttatcaaatcaatattatactcttatagcactaatcatgaggatataataatatgatgtcttggatttgcttcaaaataatacaagaaaagggtttgacttttggtcagtatatagatgagtcatgactgaccatggggtgacaattgtggaagctgagttaggtacccagaggttcgttataatattctgtctatgttaatctgcaatatgtctgacattttttataattaaaacttcttttgaaaagacaaaaatcaggccaggcacgatggctcacgcctgtaatcccagcactttgggagactgaggtgggaggatcacctgaggtcaggaagtcgagaccagcctggccaacatggtgaaactcagtctctactaaaaatacaaaaattagccaggcgtggtggcaggcgcctgtaatcccagctgctcaggaggctgaagcaagagaatcgcttgaacccagaaggcggaggttgcagtgagctgagatcacactattgctctccaccctgagcaataaagcgagactccatctcaaaaaaaaaaaaaggcaaaatcaacaaaaaatatgtatctgtaagaagaaacagtatacctcaaaggattaaggagttgatggatgagatagattttgctcttagccaaacactttgcattcagtatgtagcattttgctttgtggaagataattttcaaggatgaatgagtgcagctaaaatagttatttttctgtgtgagcacagtttgaaattcttgatgaaaagagtcagacactggtaagatatttgaatagatttattctgagccaaatatcagtgactggtggcccgtgatgtagcccttaggagatcctgagaacctgtgcccaaggtggttcgggtacagcttggttgtatacattttagggagacacaagacatcagtcaacacatgcaagatgtacattgcttccatctggaaaggcaggacaatggaagcagagggtcttccaagtcatcaatggattcaaagattttctgattgaaagagttattcaggttgaaagagttattatcaatacaaaggaatatctaagttatgataaggggttgtggggaccaaggttttatcatgcagttgaacctcccaggcttcagagagaatagattgtaaatgtttcttatcagatttaaagagtctgttctatcagtaattccgaaaaggaggagggcagaatgaggcatgcctggcttcccttacccatcatgacctgaagtagttttgcaggttaattttggaatgcccttggctgagaggaggggtccattcagatggttcggggccttagacatttatttttggtttacaaacatctctatgcatattttgtcattttttacttagaatctgcagaagagaaaatgaaacaattttgaccttttagttcataaaaaaaaatcactgtactgcagtctgtatgaaatgttttttgtgtaggtggtggaaagtggatgtgattattgtatattatttctccatcagatgtcttcaggttttacattatgaagtagacatttggacattattttttgtatgtttccagattttattttaatagtaaaatgctgttttcacttgaaaggctgctttactttggtttataaaagcaaatgttttaaatcaacataaaaggcagaagatataaacgtgctccaaagaatgttcaaattaggccatgtactatttgcaattcaaatgttatttttaaataacattaatactattgagatttggctagtagtttagaaatagggttgtatcttgttgcttatacattagaataattaggcttactttcaatatctgctcacacaatccagaaagttacatgaacgtattgaatcaaattttgttgtattttttaatgtgattatccttagggtaggtattaagtaccagtctcagggatcttcaagttggggaactcttaaaccaagaacacttgtgaaaacttctccagcgggattggggccacttagttttaagtgaataactctctacttcctcaacttcctgcagagtctcccttcccactgatcctttaacacacattccttctgccctagtactaagaaaagcctagctctctctcacgcacattgcccaagggtgcaaaaacccctgaggtggcgggggcaagcagaaaaattcaaaatattggtattctgctgataactgcctgattctaatgatctgataaaccccttgctgcccacaaaaatgaaagacctaataaagttgtcctgtgacggatcattgagaagaattttgggtgaaagatcattaagtatggaggatcagatggacagattgacagaagtaggcttcagaagatgggtaataaaaaactacactgagctaaaggagcatgttctaaaccaatacaaagaagctaagaaccttgataaaaggttagaggaattgctaactagaataacctgttgtgagaggaacataaatgacctcatggagctgaaaaacacagcgtgagaacttcatgaagcatatacaagtatcaatagctaaatcaaccaagcagaagaaaggatatcagaatttgaagactaccttgctgaaataaggcatgcagacaagactagagtaaaaggaatgaaaaggaatgaacaaagcctccaagaaatatgggacttcataaaaagactggacctactactagaatatgagaaggagatggggagaatggaaacaagctggaaaacacagttcaggatattatccaggagaacttacccgacctagcaaaataggccaagatgcaaattcaggaaatacagagaacaccattaagatactccatgataagatcaaccccgagacacataataatcagactctccaaggtctaaatgaaggaaaaactgttaagggcagccagagaaaagggccaggtaacctacaaagggaagcccatcagactaacagcggacctctcagcagaaactctacaagccaagagattgagggccaatattcaacattcataaggaaaagaattttcaacccggaatttcatatccagctaaaaactaagcttcataagtgaaggagaagtaaaatcctttacagacaagcaaatgctgagggattccattaccaccaggcctgccttacaacagctcttgaaggaagtactaaatatggaaaggaaaaaccagtaccagccactgcaaagacatgacaaaatataaagactaatgaaactatgaggaaacagaatcaactaatgtgcaaaataaccaaatagcagcatgatgacaggatcaaattcacatataacaatactaaccttaactataaatgggcgaaaggccacagttaaaagacatagactggcaaattgggtaaagagtcaagacccatcagtgtgctctattcaggaagcccatctcatgtgcaaagacacacataggctcaaaataaagggatggagaaaaatttaccaagcaaatggaaagcaaaaaaaaaaaaaaaaaaaagaaagaaaaagaaaaagcaggggttgcaatcctagtctctgacaaaacagactttaaatcaacaaaggtccaaaaagaaaaagaagggtattacataatggtaaagggagcaattcaacaagaagagctaactattctaaatatataggcacccaataaaagatcgctcagattcataaaacaagttctttgagacctataaagagactaaactcccacaccataatagtgggagactttaacatcccattctcagtattagacagatctatgagacagaaaattaacaaggatagtcaggatttgaattcagctctggataaagtggacctagtagacgtctacagaactttctaccccaaatcaacagaatacacattcttctctgtgccacatggcacttgttcgaaaatcgatcatatgattggaagtaaaacactcctcggcaaatgcaaaagaactgaaatcaacagtctctcagaccacagtgcaatcaaattagaactcaggattaagaaactcgctgaaaactacacaattacatggaaattgaacaacctgctcctgaatgactcctgggtaaacattatgacattaaggcagaaatcaagaagttctttgaaaccaatgagaacagagagacgatgtaccagaatctctaggaggcaactaaagcagtgctaagagggaattttatagcactaaatgcccacatcagaaagcttgaaagatctcagatcgacaccctaatatcacaattaaaagagctagagagacaagaacaaatgaatccaaaagctagcagaagacaagaaataactaagagaagaattaaaggagataaagacgtgaaaaccccccaaaaaatcaatgaacccaggcactgtttttttgaaaaaattaacaatatggatagaccactagctaaactaataaagaagaaaagagagaagaatcaaatagacaataaaaaatgacaaaggggatatcaccactgacctcacagaaatacaaactactatcagcaaatactataaacacctttatggaaataaactggaaaatctagaaaaaatggttaaattcctggacacgtataccctcacaagattaaccaggaagatattgaatccctgaatagaccaataacgagttctgaaattggggcagtaattaatagcctaccaaccaaaaaaagcccaggccccagatggatttacagctgaattctatcagaaatacaaagaggagctagtaccattccttctgaaactcttccaaacaattaaaaaggagggactcctccctaactcattttatgaagccagcatcatcctgataccaaaaccaggaagagacacaacaaaaaaagaaaacttcagaccagtatccctgatgaacatcgatgagaaaatcctcagtaaaatactggcaaaccgaaaccagcagcacatcaaaaaacttacctaccacgagtaaatcggcttcatccctgggatgcaaggctggttcaacttaagcaaatcagtaaacataatccatcacataaacagaaccaaagacaaaaaccacatgattatctcaatggatgcagaaaaagcccttgataaaattcaacatcccttcatgttaaaaactctcaacaaactagggattgatggaacatatctcaaaatgataagagctatttatgacaaacccacaactaatatcattattgaatgggcataagctggaagcattccctttgaaaactggtacaaacaaggatgccctgtctcaccactcctatttgacataatgttggaagttcagaccagagcaatcagtcaagggaaagaaatagcatattcaaataggaagagaggaagtcaaattatctctgtttgcagatgacatgattttatatttaaaaaactccaccatctcagcccaaaaactccttaaactgataagtgccaaatcatgaatgaactcccattcacaatcactacaaagagaataaaatacgtaggtatacagccaacaagggatgtgaaggacctctgcaaggagaactacaaaccactgctcaaggatgtaagagaggatgcaaacaaatgaagaaacattccatcttcatggatagaaagaattaatatcgtgaaaatggccatactgcccaaaataatttattgattcaatgctattcccatcaaactaccattgacattcttcacagaattagaaaaaaagtattttaaatgtcatatggaatcaaagaagaccccatatagccaagacaatcctaagcaaaaagaacaaagctggaggcatcatgctaccttacttcaaactacactacaaggctacagtaaccaaaacagcctggtactggtaccaaaacagacatatagaccaatggagcagaacggagacctcagaaatctgcaatcatctgatcttcaacaaacctgacaaaagcaagcaatggggaaaggatatactattcagtaaatggtgctgggaaaaccggctagacatatgcagaaaactgaaattggaccccttccttacatctaatacaaaaattagcttaaggtggattaaagacttaaaagtaaaacccaaaaccataaaaaccctagaagaaaacctaggcaatagcattcagcacgtaggcatgggcaaagatttcatgacaaaaacgccaaaagcaatggcaacaaaagctaaatttgacaaatgagatctaattaaactaaagagcttctgcacagcaaaagaaactatcattagagtgaacaggcaacctacaggataggagaaaatttttgcagtctacccatttgacaaagggctagtatccagaatctacaaagaacttaaacaaatttacaagaaaaaaacaaccccatcaaaaagcaggcaaagaatatgaacagacacttctcaaaagaagacatttatgcggccaagaagcatatgaaaaaaagttcaacatcagtgatcatcagagaaatgcaaatcaaaaccacagtgagatactatctcacaccaggcagaatggcaattattaaaatgtcaggaaacaatagatgctggggaggctgtgaagaaataggaatacttttacactgttggtaggaatgtaaattagttcaatcattgtggaacacagtatgacaattcctcaagaatctagaaccagaaataccatttgacccagcaatcccattactgggtatatacccaaaggaatataaatcattctactataaagacatatgcacacgtatgtttattgcagcactatttacaatagcaaagacatgaaaccaacccaaatgcccatcaacaatagactggagaaaggaaatgtggtacatttacatcatggaatactatgcagccataaaagagaatgagatcatgtccttcgccgggacatggatgaagccggaagccatcatcctcagcaaacaaacacgggaacagaaaaccaaatacctcatgttctcactcataagtgggagatgaacaatgagaacacatggacatagagagaggaacaacacacaccagggcctgttgggggctggggggtgaggggagggaacttagaggatgggtcaataggtacagcaaaccaccatggcacacatgtacctgtgtaacaaacctacacgttctgcacatgtatcccatttttttcttttagcagaaatttttcaaaaagattttaaagacaaaaaaagatcattaagtaatttttcacatggaattcagagaattcgtaactctactacaacagtctacatgaacaaggtttctcagcactaatatgtataaaagcaaaaatcagggctaatattgatgctgaaccctgtcttattctagcaataactaatcttcattagcagatacataaactagtcgtgaaaaaagcatatctaattaaaagagaaatttttaatacattgtttttgtggaatggtcacaaaactttttatatatttttgctgttttgattggttatattcaaataattataataatccagtcaggtgatttgttttttacacttagaggaatgtattgtcaggaaatatttcaacctttcttaaatttaaacttatataatttcatggcagagaaatatgtagtaatcaataaaaaaccttcaagcataaaattacattaagataaaattatgtaggggaaatggaatggaaaaagaaccaatgtagaatttctattacaaatttctattttagagtttattcatgtgtttttgttaatggtgagcatcaaattacttgtagtacttagattttattggctattcaaaagactagtggaaaagttatatatttaaacgtcaatattcaaacttgtgggaaattacatactttgcagctacttaaacttatgaaaaaatgtagttttcaacctaaaataaggaattattttatgaaataaatgagcaaatgtttgaagcccgcttgaccacagcatgttgggtgccatgctggatcttgaagaagtacactgcactcatagaatttattgtcaaatttaattggtgatgtttcctttgttcaacaggatggtctgacaccactgcactgtggagcaaggagtggccacgagcaggtggtagaaatgttgcttgatcgagctgcccccattctttcaaaaaccaaggtaatttcttttcaggtttctggacattggactgtatttattttgatggttatatgatctagccttttgaatcacatagaaaatgacattttcaatgtagcagtcagagtagttatgttcaccagatctttatagaacctcagaataagtttgggctaattaagattttatgtagaatgtgctataccacaaagttgtttgtgtgtgtgtggtttttgttgtgtttcaggaatgcttactgcttgattttactctgtgaaattttcatagctcagaaataattgcttgtcaggttaagaaagactaaagttctacactctctaacgtttgggtgccggctatcttcagcacctcagcttacttcttgagagttcatagacttttaaggaggtcaaggatatcacttagctgataaagactggaaactttggaaagactgcaccttgattgggcttttgggaatgttgacatagctgaaaggaacacatgatgattgcctgaaaaaaattaatggttgactctcttttagacttttttttaatagtaaaaccatttgacatcatttgaagaggagaatatttgcaaataaattttgagacatgtaaaccacctcattgtcactactacttttattaattaaaccagtgatttttttggaaatgatactaagctttactaagagctttaatctctaaacattatcaaagcaacaaaagcacatattatttctgtcttcactctggtcagtgtttcctcaacaatattaggaaggctagacagggttgagatggtctggacaattccatcactcatttaaaacgtagggtttagattggtgagctgttgagggtattgtctaacagaattaaacagccatgatgttttcattgtatatgatgacatcttggccttttgagtgtttcttatcttgatgattctatttgttcttttccttttacataccccatatctattttctttccccctccactgctatcttctaagccacattatcatctctcacctaaccactgtagtagcttcctgttggtcccccatttccctttttgctcctttacaaatcagttcccactttgcagtcagagtggccatataaactgtcatccaaatcatgtcagcctcctgcttaaaaaccctcccattaatccccattgttctctttcaaattgattttcattttctcagagcagtaaggaccaatgttaaaaatcagagagttgctcatattttttctcctattcatctcattgctttggattttttctgagaaatcttcttaatttttttcttccaatcttttaattttcaagaacattttcttgttatcagatagcttcttttcttaaagtatcctgttcttgtttaatgggtacatttttttctgttacctttctgagaacatttgagataacttttcttttaatttagtttttctgtttcccaaatgtccctaattcctcagatttcctttttttcctttttttttttttttttttttggctctgtattttacaatgaaggcttcccacaatggctgtacctaattgtgtcaggcacaaacatgtgagtggcagctctaaagagtgtaggcagtgctgatcaggtggcagtggttaagaggggctctttaatgtcacaattaggttccctttaccttaggcggtatagttttttgagagacaaatccaccaacctttgcagtgcacacatgtgtgaatacattctgagtaggggaaagaggctgccagtcttgtgctttatgcatactttaatcataataatgataagcaatattttacatagtgattactgcttatcaggctctatgttctttacacatattaactcatttaatcctcgttaaatgagatactggtattactgttattcccttttcatagatgaggaaactgaaacccaaagaggtaaagtagctttctcaaaatatcccaattagtggcagaacaaggatttgaacccaagcagcccaactccagagaccacatccttaacgcctccattctccttcctttttctgtgatcacctattcttggtccagatcctcgtcactgccctctgttctgcctgggcccttgagtctgaatctctctagttcaccttctccagacactaattctggtgtccttcaggctagcaggaggcagttacctgactttgctgagttgggaagggcctggagacctgacggctccatacacagtctttgaaccaatcttatttgcagccccaagtctcactttatcttctgaggtactacgcttccacagcctttgcctttttgggatttgagaggcaaatcagcttgtctttttattcccagcagtgtgctggatcctgattgtatcggctcatgagctggttgtgtacatctctttccaattccccattcagtaacatcagatggacggcttgaaatgggttattgtggggggatttacagcatggaaattgggtagtgctacacactggggcttttctttttccaggagttgggtgttaaaacatttgtcagcacagcactgattctactgcttcagacacttaggtttcagcctctctcttcagctggatgaattaccacactcaaatcctcttttcatattctgaagtttggagacaaccctcatctggttttttatttcttccccattgtgtgtgtgggaatggaaaaggaaacacacatgtgtgcccttctagattttaccctttaaatccattactgctttttggtggagttttgggagaggaaggatacatatatctattacacctgctgtgtttgatcagaagtctccctctgcactgaggatagacttcttaacagattctgaccacctctcttcctcatctcctccggttttgctccttccttgccatcttttagctaaccagccttcttttacttcctagaatacgcctttgttctcatttcctgtttgcttggtttgagttccctcagcttgttccagatctctgtggtccccgtatattcttcaactcaaatgtcttcctcatagacaggcgttttctcacgatttacccctcccatcttcaccacctcctgccagtgccatctggccatattttattttctttagagcttttaacaccatcttgaaattatatgcttgtttacttgcttgctgtctggttctcttcaatagaatgaaagcaagaacttttccttgttgagtgcaatacccacaagcacctattttcatgcgcagaacacagtagggcttcagtaaatatttgttgaatgactattaagtgaatgagtacattcctagccttaaggccatctgacccgttcttcaagaatttcatcttactgagctaagaaagcccatcacattggttccatattttcaggcaccatatgtaataccacctctttccatagggcagatgatcttttctttactgttttcttgtccttctccaattatctttaagtttcccatccacacaatcattgtgtttttgcattgctagagaatttttttttattgacactgcctcccatttttactctccactattacttgttctctcagattttgtgggatttttttgtttgttcacttgtttacttcatgttttcctctaagactgtatcaaaacataaagcaaaagaatattttggcaggaataaagcagtccatatgctcgtgggtagcagtatctcaaatgggaaatgttcctaccttttcctgcaccttaatttctacggtttaaaatatttgagggaaattttttaggcagaaatatcctgatgggctgacagtgtacgaggcctttaaattgacctagatatttgctgagctctttctgtatatgcaaagctctcttctgggcaatgaaaaaataataaccatgtacctcttgccttcacggaacacaaatagttgaaatatatgtcagagagtggataatgccgttagaatggttaacaaggagcttatactactttttcttatcttgaactccttctttgtgtcatccattgataaattcagagcaaataacttggctcagaggattcagaaacctctggttccttggtacatatttgatctgtcattgtcaaaattcattgatgacaatttttttagaaactgaatttgctgtcaaattacttttccctaatatatgttaaattatgttacaataattgatagagcctctcttgataattgaattctctaggaatttcccaggctcccccacttcgccatcatagttaaaagaaaggactgacatcttcatagcttgttttgccttcattaggaaacatattgagtgccagtgtcattctaggttttatttacctttgaccctatttatttattctctctgctctttaaatgaattttcaactcgctcctactgcacgtgattaactgtgttattgaacccagttgatttaaactaacaagtcaagcattagttagtggctttgtcaatgccttgcctttcctcatcatagacacatgggggcaccagattgatagaaaagggaaaagttttcctttcttctttgatgtgagatgaaatgcgttacattcagaccttttttaaagtcaaatcagtatagtcttcaatattgggtgttagtaatctctaaggacaaaattaataccagtccaatgaataccactgttcttaccttcattttttcttttagtcttaaatattaagaattcctatctggccaaattacagtggctcatacctataatcccagtgctttgaaaagctaaggcaggaggatcgcttcaggccaggagtttgagaccagctgagcaacagagtgaaaccccatctctatttaaaagaaaaagaaaagtaaaattcatatgcctctaagttatgacccatgctgcaattctcacttctattaaattgggaaaagacattatccttgacaacttgttattgactggcataagcagttgggaggaccagttttaaaaatagctgtagttcaaaatagttgtcaaaagcttttacaaatagaaggtattttcatgtgaagaactggagtttttatctgtttatatttgcactttgtgttctgcacatttgtgtttaaaaggtaaaagaatgaactctgatttctttatgtgttccagaatggattatctccattgcacatggccacacaaggggatcatttaaactgcgtccagcttctcctccagcataatgtacccgtggatgatgtcaccaatgactacctgactgccctacacgtggctgcccactgtggccattacaaagttgccaaggttctcttggataagaaagctaaccccaatgccaaagccctggtgagtggctcaaccagcgagtccagcctcagttgtcttgctcacaacgtgctgcctctgtatgtgaagggaatgctttgaggaggttaaaatagaaggtgctagttaaagtgtacttcttgtcaattttttcaaatatccttcaggaaagtctacaaaattttctatttctgacatgagaaaggctgagggagccaaactgttaatgtttttatggtcacataagtgattcccgtatgaacccaaagactatacaattataaaaagactaaggtggccaacgtcgtcttattgtggataaacttataattctgtgaattaaaagtttattctgagatctgaaaacaaggcaaagttatcaaaaaactctatttgaaacataagtggtctaggaatttgtgagctaaaattttatatatcttaaccttgtaagttaatgaaatattgcctgtaatcttctgtttccgtttgccaatcagaattttggtccagtttataggcttcactttaatttgttcttttaacctttagctatgctgtactttggttttctcagcaagatggtacttgttgtctttgcaaaaataaatggtcccaaattagtaagctgtctatttcagaataagtacccaagtttaggaaaaaataagtcacccaattttagggaaaacatgtgagtttactagcaattttgaggtaaaggttgtcatcatccaattgacccttttaggaagggtttttgcccctttccaaagagtgcggtcatcctgtctggatagatccgtaccacctcttgtactctgtgggctctaaaattcagagtggacaggaaagaatgacgaaagagaaactctccagaccccagacacctccttgccactataattctaaaaccttttaccaaagcagcatttcaagatcagtctgttgacccacccagtctatcaaatgtgtctgaattctgagaagggaggaaaggaaattagcagtcatgactcttttttccatacaagaaaaaaataagtcctaaaacagggcgtgggctcccactctcattttcctctgactctgaagatttcacaacatatggaggttgtagccagtcatcctgggatggactgtggccaaatggtctgagaagcctcggtgaaagcacctgcagtgactttgacctaagcttttacagtggactctggtattttatagttctccactggcagctgaaatacgtgccacagtctcaatcggcaggcaggacaacttaggacataatttattaaaaagcagattcttttattagattaaatagtaaacaaaatgattcaaataatgggttatttacatttctgcatgcttggagtaaacacctacttgaagcataaagctagagaagaaatcaaaacgttttagagctggtcttgtagttgtcctaaaacacagcaaagagaacagaataaaccttggtgaagtggagctgtgaggacaaatgttggggccagacgttttcagtctgtatttgaaatgaggtagaggagggacatattattattatttattattttgaaacagagtttcgctcttgttgcccaggctggagtgcaatggcacaatctcggctcactgcaacctccgcctcctgggttcaagtgattctcctgcctcagcctcccaagtagctgggattacaggtgcacgccactatgcctgcctaatttttgtatttttagtagagatggggtttcaccgtgttggccaggttggtctcgaactcctgacctcaggtgatccacccacctcagcctcccaaagtgctgggattacacatgtgagccaccacacccagcctgagacatatttggaagagtgaattccaaaataaaataatgaaatgaatgatcatttttacctcagctaaccaggagagtgtaataaaaattcacttcctgttcacaattatcagggtaccttgggttcccagggcagctggactacttctagaatagaatctacatgctgcttaaccctggtactttctgttcatttcaatttaccacacatcattttagcaaaactatttactgcacacagtgaaactggattttgatggaatgtagtcaagcaggtatatgtatttgtcccttgcagaatggctttacccctcttcatattgcctgcaagaagaatcgaattaaagtaatggaactccttctgaaacacggtgcatccatccaagctgtaaccgaggtgagaagagttaagatttctgggagtcctgagatactgagagtatagccttagcagccagagccccagggccatctccagggaccagctagtttgtttgcatatcatggccatagactgcattctgaactctttaggaagagggctgccagtccctaggagaagcagacaaacatgttggtgggtgagtttgatgcaaatgtatcaccatgtcaagaaatgtaacctaaaacacatgcttaaggggaagggcaccttcacagaaagcataatttatatcaaatcctatactgtagtacttctctagtgggtgcagttttgtcccccaaggggcgtttagtcatgtctggaggtacttttaattgtcacaactggatagtactactggtctctagtgggtcaaggccaaggatgctactaaacagtttacagtatacaggacagtctcccgcaacaaaaagtcgtctgattcaaaatgtcaaatgtgctgaggttgagaaaccctgcacaagacgaccttggtgcttttctcaagtaagggttactctgtcttaaaactcaaaattaatgaaacagctgctgaggttagtaaagtattagacctaagtttctctcataggaaccaactcagaactcagagaaatgatccatcagaatcagggctgtgccttctacaaagcaaaccaagcctgacacctaccctttcagacttgtcccagacccccaacctccacctcactacatcctagcactctgattgatctctgttaattctaattctaacccttggcacttccatagactagacactctcttgtttgcctccgtatgtctctgcctctgtgtgtcacacccccttggccaggcaaatcctgcacgtcctttagaaccagatctgggccaccttcttcaggaaacccccgctcactccccagcctggactacatgttccttctaggaaccatcacctcatcgtgtgcatatttccatcaaagcccttatccagctctctgacttatgactcagtggcacccccaagaaccccagaggctgaaggctccttggaagcagggctgagtctgactggtcttcatatacccacactgtctggcccatacacagatcattcagtaaagttttgttgaatgcctgatgcttaactataggatttgaagcaaacataaacattaaagtctagtctagtgattgttgcttggcttcagtttcttgcctgcaaatggaatatttgcctagatttacacttagaatttttaaaatattaaatggttgacaatatgaatactgatttgccatattgtcaggcttatgggttcatattaggcaacctgttatttttaagtataaaatagaaagtttactttcagtgcataggaaccctcttagagataagaataggctctaaaataaaagtaaattcttggctgatgtttgagtaaatgtccagagatatcaaccagtaatccagctctctgttccctaagagctttaaaaggcagttcagaccaagattttgccttgcacaagctctaactactccccctgctgatggaaaaaggtgccaagactataacaaaattctcattttcctaattgtcctccattcttctcactttttgaattctggacagccggaattattccttttctgtcttttacctcactttgattgtatagaattcctttcatatatttttgacatttctcaaatttctgctgagattaattatccccttctgtcccttttttaaaaaacaggttagctttttctaaacatactaaaaaaaatgttttatcaagttatgatgttcatgttgtaagctaaattaaactgaaaaatttaaaatggaatcatttcatataaaaagcacgagtaaattatactctttaaaatattaatgacttgagatttttatctttcttattcactctaaatctcacaatcatggacatattcaatataaaatatcctggaatcaataaattctgctttacgctgaagagtattctggggtctatgtacatttatgtatatgtatgtgtgcataggatctgaagcaattcaagtctagtctagtgaccattgtaatatttgctttatttagattgctttaatttataatacccataaagttaaacaattaaatgtttgaaactattaatgctgatttgttcatttattaaagaaacagctttgtgttaggtaccctgctcttttatatgtgacataaatgggaatcctctttaaagcccagaataggatctgaaataaaagttgactttttactagtatgtatgaaatcacagctctcctccttctacacacacacatatggataaggaaggtttattagtaaaggggaaaacaaccttcaagttatttatcaattttttcaaagatctacattaaaagtatgaaataaattctttttcttttttaataggtatgacataagtctttcatagtaacagaatttgctttaggaaaacgatgattatatgtttatatatttaccatatagaatctgtaacataatggtgaatgtcctgatgtcttctaatccgatcattaaactgatttagatgggtggatggatgacaggcaggcaggctcacagacaaaccttttttatgctaagccaacaaaccaccattttcttcttttccccttagtcgggccttaccccaatccatgttgctgccttcatggggcatgtaaatattgtatcacaactaatgcatcatggagcctcaccaaacaccaccaatgtggtaagtattctttgaacaaaggaggtccattgtgagtatttaataaactggcaaaggtggtttttatctactttttttattttttatttttttaagagttggagtatcgctctgtctcccagactggaatacagtggtgcaatcatagctcactgcagccttgaatcctggactcaagtgctcctcccatctcagcctcccaactaactgggactacaggaatgtgctatcatgcctggctaatttttaaatgttttgtagagacgggggcctcactattttgcccaggctggtcttgaactcctggcttcaagcaatcctcctgcgctggcctcctaaattgttgggcttataggcatgagccaccatgcccggccttattgttattataattaattaatatgtaattaatatgactacttaaaagaagaaagttcaagaatacatttgtttcctttacttcaaaggcaagatacactcggtctctagttggccacaaattgttaggacttacgaactacgttcattaaccttacaggtgcattactactggatattatgttttaaaaaataaagtgtggccgggcacggtggctcacgcttgtaatcccagcactttgggaggctgaggcaggccggtcacatgaggttgggagttcgagaccagcctgaccaacatggagaatcccccgtctctactaaaaaatacaaaattagccaggcatggtggcgcatgcctgtaatcctagcaacttgggaggctgaggcaggagaattgcctgaacctgggaggcggaggttgcggtgagctgagattgagccattgcactccagcctggccaataagagtgaaactccatctcaaaaaaaataataaataaaaaataaagtatggggggtatttttctacaacaaaaacattaaaaagtaccgcatgttggagaggttgtttagatactatcgtcgtttatacaaagaagtgattttagcagggcatggtggctcacgcctgtaatcccagcactttgggaggccgagatgggtggatcacttaaggacgggaattcaagaccagcctggccaaaatgatgaaacctgtctctactaaaaatacgaaaaagaattagctgggcgtggtggtgcatgcatgtaattccaactactcaggaggctgaggcacgagaatcacttgaacttgggaggcagaggttgcagtaagccaagatcatgccactgcactctagactgggcaacagagtgagactctgtctcaaaaaaaaaaaaaaaaaaaaagaagtgatttcaactaacttcaaggtagtctctctttaatgtgcttcaccatgttatagcaaacccatggaattctgtgttcatagattactcgatggtattcttttcccacactaaacattgctctgtaggaaccatgaggctcacttcagagtagctatcagagtggtaacttaccacccatgatctgcatgtggcatttgacattgttttatagaatttcaaatttgacatcataatattagcacaacagaccatagacataataacactcattggactcatgagcattaaagaagtaacaataaaacaagcaccatcctggcacagaaggggcaagctaggaggccctgcacgcttaccctgagagtggggctccccagtaagagtgcatcttccagcagccccaagcagtacaaccaaaagatagaaataggccagcttctgagatgaaatacagtctttcctagtactaattgcacagaatgttttcattcgtaaagggaacactgagtaatatactaaatgacatcctcagcacctttccagtaaacacaatccaccagtttcctgtggaatctgtcttcacgtgtccttccatggaagtaggtggcctataaagcaaagaccaatttataaaggcagtttaaaagtgagcatcacctatgtgagagaatatatttcatttttgttatttgtccatttcagtgtatctgtttctaataccattttcatttttaatcaagtaaagaagtaatctggattagaatctatttggtgaaaaagtagggggagggtggtccagggcaaagaaaatgacccactgggaaaaatgcccaaagactaagatattgatctgttcagataaaacaagaaatgcaaaccggctgttgacaagccaaatccagcccttggctatgtttaggttgcccatgtagtgttttgtttttaattctgaatttatggtcaatatttaagagttagaaaatttgtataaaatccagactgccacttcttttgaaaagttgcatggtgtggcatggtaaggctggcatcttgcacagtgacagcagcgagctgcagatgtggggggtgtggggtggggggttggctgcctgcttcagcgcaggtgtgggctctctcaagcactccacacctgcccagctgcactcactcacccccctgcttggctcctatgagcactgacctttccagccctgagggaggccacattgtaggttactgagcagcacccctggcacagtgggtgacaagactcccgaggcttatgccaaagtctttgcctcatggaccaggttcctgtgaaattctcatgcatttgatttcctatcttttcaataaggaagtgcttaggactattttttatttttgaaaaaagtccatcataagctttatgccaaataaaatacactactcttcttcagagctgcagctaatttactttggctcatgttccccagagaggagaaacagcactgcacatggcagctcgctccggccaagctgaagttgtgcggtatctggtacaagacggagctcaggtagaagctaaagctaaggtatgcgcaatacttgacaagtgtttgaaattgaggaaaaactgttggattttcataaaacttttaagtatatacatgcagtctttcaagaatactttaaaaatattgaaaaacctccaatgataaaagtccctacccaagtaacattgtaaaaaatcccttccctgcacatttgttcattctattatttaacaaaatgaaataggatgagatgagaacttgtgcctgaaactgtcagcacacggctagtccctaacagattggggactgaatctagacttggtccaaagttcttcacactccgtggagaagggcttatgcacaaagcttctagaacaatcacaacctagaagcataactgagcttttctggttgacttataagtcagctgtcaacagccacaaaaggaaaatgggggatttttttttttttctacacaagctgtatggccacttcagaattggcctcgtatttcacctgcaggagaaacccacttatctgctgctattgggatagatagttcggtcaggctatcagaatggcagttcaggtccagaatcataaaccacttaatttcaacctacaatatgtaaatatacatttgcacaagtctgcagtctctagtttcaagtaaggggtggcagtagtagcagtatgtgagatttttccttggcacctattcgtttctgctttcaatattcctcttctcccttgcagcatctccctaactcctcatgcttcctactggttagatagcccctcttactttgacattgaccctcatcctccttattcttccaaaatggtgtcctctattctagcctcgtttctctacctttcctacttaaaccatttacctgaaccttatcacaattcagtagagaatttctatttagaggactaccacagggatctttgagcaaattaagatgatttgcgcctcccacttggggataagaccctaggggatcaggacttggtgagtacctcctgcccttgggtgaattgtagtgaggtggctctccagtttagacagatgcagcccttgccaggatgcacagcctggcaagcagagggcatcagcccctgctgacccttcagctgggagcctttgcacaggtatactgcgcaaccccacactgccttcctcacactctgcttttgtctatgggaaggcagaaccaacaaaataattcattccatgtgagtgcataataactggtgtggaggtataatatccctcccaggtatatgagttttactaggatacattctcttatctcccaaagaaggagcaattaaagttcaaatttgattctctgtggcaggtgtgggtggggtgtaatttatagacaactgcatttcatggttttcttattaatgagtcactctccacaggtatttaattagcttagagctaccatctcctcatttctgagcattgaagaaaaagacaaatgagtttttttagcattgactcaaaaagttgattgtacctcttacatcaagcagctaatattccctgaatttttcataaaggcaccattgtttcctcagctcatcagccttacatttctaccttgctgtttaggatgaccaaacaccactccacatttcagcccgactggggaaagcagacatagtacaacagctgttgcagcaaggggcatctccaaatgcagccacaacttctgggtacaccccacttcacctttccgcccgagaggggcatgaggatgtggccgcgttccttttggatcatggagcgtctttatctataacaacaaaggtatgaaagcaaatctcagaatcctgctctgtccccccaaatacatcttccttacgtttccccgcatagtaacaggtccagaagctgcacaacagcatctattcttgcgatcccacagtagtcattaatatggccagcaaagctctgtggtgggagagggtaactggtagtattttgtggggggttttttgccttaagtttcttagtatgttatcttccaatgaaaccttactgatatccagagtcagatttcttgtaaattatttggtggccttaaatggtagtttaaaaacagagccacagattagcaaaatgctcaggccaagcacacaaaccacattatcacagctcggttggtagatgcttttataatacttgcaaaactggcagtgaatttttcttggggttgtttttgtttgttcttgttcttttttgtgtcattattgtcttgtctgacttatggtttgatttatttttatctcaactctgatgccttagagtaataccctaacataaacagttgttctgcatgtgcagaatgcaaaatttggagctcattttttttgtgatactacataagccttgcaagtgtgatagcaagatgaattggcttgtggcgcatcttccaaagctagtaactggtactgcactcttttatttggatgcagataagaaagattaatgtgtaatcaatatagaagacaattacaaatagaaaactatcgggataaatgatgactacctcaaatttcatttcttgtgattctttgggctcttcagtagagttgagatgcaagttcaggaagctcatttgatgtgaaacagaataatgggtgatagggtcttgagtattcaggcatttcaccataccagctgcacattccttttagtttgctgtagtctcatgaggtcaaatgtgctgatgaccccgtaatccctgactcatgattgggacccccacaacagtgtgctgattggctggttgatacacagattcttgtaggagttggaagtctgagggagccagccactcagctattaatatccaagtgttgcatatttgtccatgtgtcattattcagttcacctacagaatagacgtcgtcattctaaaaccatgtcattattcagttcacctctggtggcaaaggtgagagaatttctcactcctcctcctgaagactagaggacacataaggattgtgtatacatggagaaacggggaaagaagaagaaaagtggctggtctggtgatgtgagattgtgagaggttcagacttgccctggattttcccaagccctccaaactgagtctgggaccctataacttattcttcccacaatatgaaactctgaaaacagccctagaataagccccagatccagctctccaacttcatcctggtgagatacctgaagacttccagaaccaatagcatgtcatggctcagtcagcagaagggagaaagattaggtatcctggtatgttatgctcacaccctgtcaataagaaggctcttgaactcttatctgtgagtcttggactttaaatgcagacttcactgctcatcatcaatagaataattaatcagttctggaaagcagtgcccttatgtcatatctttttgtttgtttgttgtttggtttgggttttgtgtgtgttttccttatgtcatttctattgttcattatttttatgttttttttttttcagaaaggatttactcctcttcatgtggcagcaaaatatggaaagcttgaagtcgccaatctcctgctacagaaaagtgcatctccagatgctgctgggaaggtaagaggtcaccagccaccctgaagcaggccacttccacgataacaaaatacacccttgctaatattcactaatagccactcaaattataactaaatatttaagtcccactaggatgaagagcacttgggaaataaaaggtaaatgctggggtccaagtactgtggaaaccggaatgtaaatatgccctatgtcgtatccaatctaatttcatttcctcaatctaagcctctggttttaagacacctttgacactggttgttgtttctgcacgtgttttcagagcgggctaacaccactgcatgtagctgcacattacgataatcagaaagtggcccttctgcttttggaccaaggagcctcacctcacgcagccgcaaaggtacctataattccacagcctaaggagactgatgggtaaggtctatcagtctctatctgcacatctacttctgcttcagcaggagcaccctcctagtttaggcaccactaaaaaatcacagaaatagaagcaccttaggacatctgtgccttcagtgatttagtctgctaatatggtagatactcaggaaatatttacttgtcagttgattgtctttggcaatccaggacctcctggaggaaggagagctggaacactctttagccagatgaaaaacataagcacagcctgaggaagtaagaaagttctgatttgtcagaattatgaaacatgtgttacatttttctggccacataattgccttcaagttgtttatttgcatttagtaaaataggttgagaggttttacatgtgtgtttttattattgctaaggaggatctttattgttagggcctttttgatcagtagacaacttagatttctgagaaaagagaaactgagtgggtatatagctatattattattttagtaatctaatttgagggacaaatcataaagaagagcttccttaaagacaggttaatagagtgctattggtttaataagcttcctattgttgagcaggtggctatgatcagagaacactgaaatgatgcaaaccatttcagtgttgttcagttatttcgctaaacactattggttggaggaccattgagtatcccttatgatccttctccttttttttttttttttttggagggagacggagactagctctgtctcccaggctggagtgcagtggcgcaatctcggctctctgcaagctccgcctccggggttcacgccattctcctgcctcagcctcccgagtagctgggactacaggcacctgccaccacacctggccaattttttgtatttttggtagagaccgggtttcaccgtagccaggatggtctcgatctcctgaccttgtgatccacccaccttggcctcccaaagtgctggaattacaggcgtgacacaccgcgcccggcctcccttatgctttttacatctttgatttgctaatccatgttggggcagctgcagtgctctcctttaaacctaatgtttagatcacatcattgtatacacagatgaatgaactggggttctagattactttagataccctaagagatcaagttttaggtactctctccatttagagagtatgttatcttcgacagatatttcttcctggaaactttcgatcattttctgccccatcctctccagaattatacccagtgaaatctaaaattcaaaatcaaactcccaaacttgcttttaatctaaatgtagctttcccctccacagtttctgaccctgacaaacattctttctattacaaaaccacaatgtgacttgataaaactttaatttaaaaaaagacagcagcattattcatgacagccaaaaggtggaaacaatgcaaatattcattgatggatgaatgcatatactcactgtgcatatacacacaaaggaatattatttagtctttaaaaggaaggaaattctgacatactctactataatacatggaggaatcttgaagacattgtgctaagtaagccagccacaaaaggacaaatgtatgattctacttatatgatgtatatagagtagtcaaatttatagagacagacagaggatggtggatgtcaagggtagagggagaagggaatggggagttaatgtttaatggatatagagtctcaattaggaagactaaaaagttctgcagatggataatagtgatggttggagaacaatgtgaatacacagtagttaatactactgacctgtacactggaaaatactttaaatgggaaattttgttatgtgtattttagcataattttaaggagaaaaatttgtaaggaatttaatggttgtacattttatttcatttcatttttacctctgtgcttttgggctacttttctttttctctttctttttctttcttttttttgagacggagtctcgctctgtcacccaggctggagtgcagtggcacgatcttggctcactgcaacctctgcctcctgggttcaagcgattctcctgcctcagcctcccaagtagctgggattacaggtgtgtgccaccacacccagctaatttttgtattttcagtagagacagggtttcactgtgttggccaggttagtctcaaactcgcaacctcaagtgatcctcctaccttggcctcccaaagtactgggattacaggggtgagctaccttgcccagcccctacttttcttatgtataaataaccccaagtccttcatagataacaagtaaataattagtaagtgaactattttttccttggatgagaataaaaattttggcacaaaaagcagtgtaaaattgaccaaagttataaagcagtaagtgcagcaaatgactccaatctctctttctactcacaaataatttttttttttttttgtcacccagactggagtgtagtggcacgatcttggctcactgcaacctccgcctcccaggttgaagcaattctcctgcctcagcctcccaaatagatgagactacaggcatgtaccacctacccagctaatttttgtatttttagtagagatggggtttcttcatgttggccagctggtcttgaactcctgacctcaagtgatctgccctccttggcctcccaaaatgctgggattacaggcatgagctactgtgctaggcgcacaaataactcttaaacagggcaatagttggtacattcctagttgatttctcctttacatttgtcaaacaagacttagtattcatagttctctatctgcaaaacatcctttacaaagatttgaaaagaaaagcaatcctttaaataattctttataacattccattagcctcaggcatatttttatagtcaattaaacacaggcttttctaatgggacattgattctcatttccatacacaattgcctccataagagcctgggtaatgccatctctggcacatgtccaataatccctgtcttcagggcagtggtactggtcaggaactttttctagactttaatcttaagcaaagccagtcatataattttaggtattggctttatctgctaggaaaaaaaaaaaaaagtcctagctacaatggtttaaattgatgagcctccattttctcatggcacaaacaggaggtagacagggcagttgttgatgttgatatagggtgttgaggcaagttccctgtgactttttaaaaaatcaatttgggggtacaagtgcagttgtgttacatggatatgtcgcttagtgctgaatacagggcttttagtgaaaccatcacccaaaatgtgtacattgtacccattagagaattccttgtccctcaccccactcctaccgtcccacctttccaagtctccaatgtctattattccactctttatgtccatgtgcacacatttagctctcgctttcaggcaagaacatgcagtatttgactttctcagttattttactgaagataatggcctccagtttcatctgtgttgctgcaaaagacataattttattcttttttatagctgagtagtattccatggggtgtgtgtgtgtatttatgtgtgttggtatatatgtatacacgcacataaattgtatatattataattatatataattatatacaacttatttccagctttatatttgtcaaacaagactttatagctgagtaatagtccactcagctataaacatatagtatatacatatatatatatacacacatacacacatggtatgcaatatgtgcataccatggaatactactatatgtatgtatatatatctgtatacacacacacgcgcaccatgggatactactcagctataaaaacaaataaaataggccgggtgcggtggctcacgcctgtaatcccactactttggaagactgagacgggtggatcacgaggtcaggagatggagaccatcctggccaacatggtgaaaccccttctctactaaaaatacaaaaattagctgggcatggtggccagctactcaggaggctgaggcaggagaatcactgaaacccgggaggcagaggatgcagtgagccaagaccgcgccactgcactccagcctgggtgacagagcaagactcggtctcaaaaaaataataaaaaagaataaaatgtatatatcccacatattcacatattctttatctaatcatccattggtagacacaaaggttgattttacaggactttgctattgtgaatggtgctgcaatgaacatacgagtgcaagtatcttttttgatataatgatttatttcctttgggaaatacctaaccagcggtatctaaccagtggtaggattgctgggtcaaaggtagttctatttttagttctttgagatatctccttacaattgtccttaaaggttatattaatttacgttcctactaacagtgtataagcatttccttttctctgcatcctcaccagcatctattatttttgacttctcatagtagccatttggattggtgtgagatggtatctaattgtggttttgatttgcatttctctgatgattagtgatgacgatcattttttcatatgcttcttggccatttgtgggtcttctttcacaaaatgtctgttcgtgtcctttgccttctttttaatggatttttttttttcttgttgagttgagttcctcataaatcctggatattagttctttgtcagatgcatagttgtgaatattttctcccattctatatggtacctggttcactctgttgattatctcttttgctatgcagaagctttttagtttacttaagtcccatttgtctattttttgacttgctgcatttgattttgaggtcttagtcgtgaattttttccctagttcaatgcccaaaagagtttttcttatggtttcttctagagttcatatgatttcaggtattacatttaagtctttaatctatcttgagttaatttttgtatatggtgagagttatgggtccagtttcattctccttcatctggctatcaaattttcctagcaccatttattgaataggatgtccttttctctgtgtttgtttttgttaactttgtcaaagattagttggctggaggaatgtggcttttcttgtgagttttctgttctgttccactgatatatgcatatatttctataccagtgccatgctgttttggttactatagccttgtagtataatttaaagttaggtgatatgatgcctccaactttgttctttttgcttaggattgctttagctatttgggctcccttttggttccgtatgaattttaggattgctttttctaattctgtgaaaaatgaggttgatattttaacaggaattgcagtgaatctttggcttttccctccaaagactgttgactgggttgccaaatttactttcaagccacaggcagcaagaaagtcagcacaacaaggctttcccagaagttccaccaaaccacatctccttacaccccactggccacttctatgtgcaaaaaaaggttgagaaatagtgctaagcacactaccagagaagtttgtctgttttgttttgcttttattttttgtattttggtttgggggtttgtttgtttgtttgttttcactaagaaagaaaggagaataaatacagagtaggcaatctgccttctttactccagggaagctcaggcattcctgaattccggcagtggtgagagataaggtacagagcctcaatagggcatgattaccacatggatgtgacagcagcaacctcaatgttaactcatcatcagatcacatcctttgtcctttttcttagagcatgtgatgccttctccttaccctttcttctcctttcttctcttttttaaaattgccaatgtattgtcttactcatacatgtcctagaaatgtgatgaggtttcaggaaattggggtactgaaaagtagatgggcagctctaatctattttagtccaatctatttcctgtggcaggaccttatgctggcaagaggattggcttgagttcaggcataacctggatactaattgtagaagagatagtgagctttaagtattatttatcaggtttctcttccataaaatgtgcaacatatctattgatatggatcagtatatttgtgaaagttcttgaaaaaaattaaaatatgatttaaatgctatatattacttttgataatttcaaattgcatttgcttttattttaattttgaaatgcaaaagcacatgtggcaagcacttggtcctctacatcaagagggaaaaaaccctgtaggtcagaattattctacagttgaatcactccctgttgaatttttcttttgatagatgcatctgcctttcttagtatggcaagtgagaatcatttttacttttcacaaagtagaaacaacttagaaaatttagaaaattcattataagcctcaagataaatgtgcttattatttgaagatatttcttaagtctttctgagattaacttttcatactaaaataatacctgagtcacttttcccttgctttatactttcctttgtatctcaggtaaggagctcaagataaatccttgagcaataatagtaatttgtctgtaattggcatatattacagagctgagtctgtctctgtctgtctctctctctgtctctgtctctccctgtatctgtctctctgtctctctcagagttttaaagacaggctctccctatgttgcccagggtggtctcgagctcctgagctcaagtgatcctcctggctcagcctctaaagtagctgagactacaggcatgcaccgccatgcctgactgccacagctctcttgattaaaacatttttttaggacataggattctttttggtggcattagaagtaagtaagattttcatgtgtgagctgccttaccttgttagggggttgagaagtgactaacctgaatattatatcaatagcaaaagcaaaaagagaagatgcatgataagaagctaaattctgagtttatcttgcctttaccactcgaagtagttaggttagtgttagacacattgactaattatatttcctattttagtgctgctttgtgaattttctcttttatgctggtcacttattgtagcattgggctcagaccaaagctctgcatttggctctgcgggcatcagtctctgaagggtgtgtcccagcagagggccaaatgcttctcagggcagctggggttttcagatggcaataggtcaaaattaaaaatagggatataaaatcttcttttaccctggctcatccagtttggcagaggctagtttcagaagagtctagaagtgacatttccactttcatgggttgatataagggtttgtcaagtgaggaatgctgttggacttggacatgccagtgacttaaatgtgaggttcattgcagcaggatggctgagtactgggtgcagcagcccctcaaaaccctctgtgttgtttgtgatccttccacatggctcaaaaagattgtgactgatccattgtcaagatttggatcatacttccaaatataaattcttagattctattttctttttctaaatcttcctgtctatggaaaaaaatcattctgatttgtcattagcatattttacatactcaggtttatgtccatgtcaaagtgtaatcttacacttcttgtaagtgactgtgaaccagggcaacatcccccaaaactctttcttggggcagaagaccctgatggctcctgaggcacagctgactaacagtttatcaagggaatcttgattgtctctctctgggtatcaggggtcagccaagaaaaggatgccagaatatgctgaaagctctagtactcttgattcaaaacctgaggattcctttcttcatgtaattaatacatggcagttattgtgaggcactagagagatacaaagacaaatataacacaatatacgcccttaagaaatgtatatttagtaggaggggacagataaataaacaaaagagtgccactaaatatccccaggactttgataagagtcagtcagggttgggggtaggggttgaggcttgagggatgggaagaaataaaaaacctcatggagggtgtgacccttgagctgaattttcagctgacagatgctggctgctgggcatgttggggaaaagcattcttgtagagtaaggcaagacagagaaacatgagactatattctgtttgggggacatgcaggatgacagaccagcatgaagacaggttttgtaaaagaggaaatcaaaaggccaaatgaggagagatggtagtgtcttaacttccatgaacattaaaaatttcaacttgtaagcagtagatggcaattaaaggtatttttttaaataaaagaatgaatggctctgaacatgccctagtgataactgattgtttgttgcttcttcctcctgtcctcaatttaaataaagcaagtaattatcgagcatgttgtaacataatttcctgtaaaagggaaatttatattccttttggaaaaccaataatgctctaactctttttgattaaaatgtccatattaagccgggcgcagtgactcacgcctgtaatcccaacactttgggaggccgaggcaggtggatcacgaggtcaggagatggagaccatcctggctaacaccgtgaaaccccgtctctactaaaaatacaaaaaattagccgggcatggtggcaggcgcctgtagtcccagctactcgggaggctgaggcaggagaatggcgtgaacccgggagatggagcttgcagtgagccgagatccagccactgcactccagcctgggcgaagagtgagactctgtctcaaaaaataaaataaaataaaataaaataaaataaaataaataaaatgtccatattaaattatgttttccctacttaggaatgcaggatacatgagggcactatattcatgtaccacttggtttaccagtatttgcttacttaatcatgatttcttaagcaatcatagaaaaccactagaaagagacataaactatttgaaaatgcactgtgcacatttttatcttgttcctgggcatgtgaccaagtgatttgtgttgacagaatggttatacgccactgcacatcgctgccaaaaagaaccagatggacatagcgacaactctgctggaatatggtgctgatgccaacgcagttacccggcaaggaattgcttccgtccatctcgcagctcaggaagggcacgtggacatggtgtcgctgctcctcggtagaaatgcgaatgtgaacctgagcaataaggtaacccacttctttcttgacaaagcatgcagcacaccaaaacctcacccctcagaaaggtcactaagaattcacagaagatctgagtcaaataggatgtgtaaagtgtaatattgcaccaagttgtttaccaaagtgttacttaacagagcaaaaatttggaaacaatctgtttaaacaataagaaaaatggtcaatgcgccagttgctctggctcaggcatttaatcctagcactttgggaagacaaggcgggtagactgctcgagcccagaagatggaggctgcagtgagctctgattgcttctttatactccagcctgggtgacagagtgagaccctgtctctttaaaaaaaaaaaaaaaaaagacagaaagataatggtaaataaataattcagataattcagtcagacaatgagtatatatggaagtggctctatgtacacatagccataaaaatgaagtccaggaagtttttgtagtaacataaagttttgttataatgttaattcaaagagcaccattgttacttcaccataacatagcaaagaagaagctgcaaattgtagccctttgctttatttcacaaacatgtttggggtcctgctccttgctcatccgtttttaagttctaggttacaaagagaaatgggaaacattgctgccttcgtgagttcattttaataacaaatttagagtagctattttatggagtagataggagaagttgttggcaattttgaaggaacttgtgaagactgttccctaaactcttcaaacacccatgctgtcatctttgatatgctcattattcatgaagaaaagactagagttttgtcaagcaaagtgaaagttcagccgacaattaaccagaaacttgttaatgaagttactgcctctccctgtatgtatcaaatttaggtttgctgaattgctcattaagattgacccaaaacacaagacaggtgtttctaaatcttcagataataggaaaccacacaaaagggccctcagattctgataacctcccctgtctggcatttagcttctcttctgcctgctgggtgtgggcatagctgtgatatttctcaggcctagctcagatattggagtagggttgcaaaatagcaatagtcttatgttgacaaataacaagtaatttaaatactttcaacacgtgtgcctgtgttttgaaatcacagagagtttgaatcctaagttggattcttcctgtgtcatttaggcaagttatattacctctctgagcctcagttttgtcctttagtacatggagatagcaatactgacttcttgagttgctttgaggatacactgagaaaacattcaacacttttaagtaagaaaaaatcgtttttttaattttggagtttttacagttttggaaaaaggttactccataacaatctgaattctcaaggttattatttaacaaattctatagaccaaaagacatatacaggagaccagggatatctttttttagttttagtattgtgaaaatcttttttggtcattacagagcaaacacatttttttaattttatttttttcttgttaaacattccttttaggagtgcatgtctcagcattaatgggaatcaaaaagcaatttcataatcgtcattatagttaagatttgtttgatcttttgaattttctatagttttatataccaatttagagaccagaattgtaatggcttgcctcaaaactcaatttgtctttatgacaaagaggaccttgtgtttcccaaattgaagcacatgctggtatcagagtgtattttctcttgtgagcccataatattgtatttcatcatttcttccagaaacaatgtagtactttcacaattggtttaaattgaatatttccagtaggtttgataccaaactgcagtgtgactgactttgtttcttcaaaatcctgcagccaactggtacaatatatgcccagccttgaattcatcttagcctcatagggtgattttaggctaaaaatatttagggcaaaaattttctcagtgcttgttttagtagagtggaaattaacaaaaggaattctaaagactcaaagacatatagcaaaccagggaaacctggaaatttctggccactttcctgagtaaatgatacacaagcagagatattcctaaaggaattctaaaagatcaactggctttccattagcatgttgaacttaaggaacttctgagaacttctaatacttttaacttctaacttctcattagaaactatctaataagaaggcatttgtaaatccttgcatcctttctccgttgtcgttttcagtataaagcactaaatatgccctgatgtgaaaacagaaaagcagcaaaactttttattattcaataaggaactgtctctcagtttttgtcagtttttcctgagctgccagtgttttaagcatcaattactcactgttccctcctcccttctcctgcctacctttccctcttctcacataacactacattttatttccttgctaaaaaataactattaaaaaagatttagctttcataatttatgttgaactaaacactttattgtttttactttcttttttcttactagtaaccagcactttcccagtacttttaaggaaaaatgatcatgaaccccaagttattgttgaggtgctagtgttcgatttgattcaattttgcttttgatgttcctattttcccatataggttttgcagaccccaatgcttatattttttatacaactgaaagaatattaaacagagatgttgctattttaatttgatgttttctctgtttcaaataaatacctttttttttttttttgagacagaatttcattcttgttgcccaggctggagtgcaatgatgcaatcttggctcactgcaacctccgcctccagggtgtaagcgattcttctgcctcagcctcccgagtagctgggattacaggcatgcaccaccactcccggctaattttgtatttttagtagagacagggtttctccatgtaggtcaggctggtctcaaactcccaacctcaggggatccgtccgccttggcctcccaaagtgctgggattatagacgtgagccactgtgcccggccctaagtgctatttttaaaatgagcaatgatcaaaatgccataaaagattaacaggtaacttctgaactcaaacagggctgtggttaccttcatattgttttttaaaatcttttgaattataaccaagaatataaaaataaaatgttatttatataatttatactgttctacctaagaaaaatgtttgattttttttctctgatttaatctatgagtgagtggattaaatgctagatgctagacactggttatataaaaatcaaagatacgatacttgcctcaacaagctcacagtggtttgaggaagacaagcaagaaaacagagtttaaatgcaggattatgatatttgtaatagaagtgagcacatagtaggtttgcacataaatgtaataacttggccctttattgaaacgagaagagagaaaggccagggaagcctgaagtgactccatcagtgagtgggtaagccagctgagcagcaggcacctagacatgggagcatgaggggacaacatgtgcccacaacacattctcagtctttgctgagagctactcagtaaggtaccctcagtgtcaaaagtttcaaacttagaataggtgaccatgacactcacaaaatgttgtggctgacaatattatttcctctgaaggagaacacggaacatggttctgtgatgaggtcagtgtttgggtggtgccaattttggctctggcttatttttcttgaatttcaagtgaatgcatcagtcctccttttcacatttccccctttattcagttcaagtgagcttcctccaaaattctataaacattattaaaaagtcccagcttgactctctctgcattccataattgctctgatggaatagcaacccctgaataaataatgtttcacatctagaagactctgtgctcttcctgaaactgcctttgattacctcctttcctctgacaaataggacaggctgatattttcattgcacagatgctagagggggagaaaagacttccaggattaagatattaacttctgtgctcataatggatgaaagcaaaaaatctgaaagtactaacaccaactcactttctcttaaatattataaaaaatgctttacaatttaaagaggttttttaaaaccggagtataatcttagtaattttttttcttggtcatgagagcaaccatgtgttctgcaaattctctaatagggttagtttcaaatactgtatcagtcttgttaaatccatacatcatctaaatgacctggaaattgtcatgatcttgcattcacattacatttcacaggcgatctttcctacccagagtgacatacagaaaatattcattagaccttgggaattaatatggagaaaatattatcagcatatgtcagtgttcactttgtaaacagatatcatttaaataatttttggtaaagctagtggcattggcaatatgttaaaactcttgcataattttgtaaaaaaaaaaaaaagtctaatttttgtagatgaacactgaaatgtatgggggtaaatgttatagtgtctagatttgtgttaatattgccacaaatgaatgaaaaggaaaagagggataggtgaaacacatataggaaaactttgataattgctaagtctgtgatgagtatacaaggctcactccatttcttacactttcgagtatgcctacaatttttcatgcagcctacagatagtcatgttgccacagtgctaagacagtataacatataatttttttttttgagacaggtttcattcaaccctgtcaccaaggctggagtgcaatggcgctatctcaactcactgcaacctccacctaccgagctcaaacaattctcctgccttagcctcccaagtagctgggactacaggtgcatgccactgcacctggctaatttttgtagagatgggaccttgccatgttggccaggctggtctcaaactcatgggctcatgtgatccacctgcctcagcctcccaagcatataaatttattccataggttttttctaacatagaaattctcggcttaccatcttagaattcacaaatggtttctcaaacatggctatgtgtgtgacattccttcctgtacgatgactgtgccctttgaatcttttgcagagcggcctgaccccactccatttggctgctcaagaagatcgagtgaatgtggcagaagtcctcgtaaaccaaggggctcatgtggacgcccagacaaaggtatacggccctcccttgccacacggaaaagaatgtgtccatttggtgactgcagtaaggaagaaactataattgtatcaggagaacaaaccctttaatcatctcttttctacgtagtattttaaatgtttatttatgcaagggacactaaagtctccggttgccgtattccagggacttttgtctttaacggcctgggtacttgattctagctgcacagtaatttccccctatattaacactgttgagcctccttacaacaaatgtgtccttcggggcagagtgtgaaagcttgtacctttcttagtttttgtgatggatgttttaaatgcagacaaatagacaaatagaaaaacttgtaatttgtgacctctacgttcgttcagcatgatttatgaaacaggataaattaaggcttatttaaatattactcacttgctaaattcctaatggtctgtgcggtcatgcgtgtgttctccctctctcagacgagaaagctctcatttcaaaaagaaaaaaaaattgctaattaatcttatataatgccacaactcaaacacacacacaaaataggacttctcatgtcatcatcaaagatatagcttcacattaatcacatttctttgaaaattttctttatatgcttaattttgttatttcttcatatcagatttgtgtcatttgtgtcatctactctaacatgttttttttttggtttttttttttttttttttgagacggagtctcactctgttaccaggctggagtgcagtggcttgacctcggctcactgcaacctccacctcccacgttcaagcaattctcctgcctcagcctcccgagtagctgggactacaggcatgtgccaccatgcccaactaatttttgtatttttagtggagacggggtttcaccatgttagccaggatggtcttgatctcttcaccttgtgatccacatgcctcggcctcccaaagtgctgggattacaggcgtgagcccccgcacccagccacatatgctttctttctatatgccatgtttgacatgaaaaagaatgactactaaatattgtgaataaaatttttatatgtaatataggcaggttctgaggtatatgggcatattgaagtaactagtaatacagaaatattaccccaaattagccagataaaagggtattgacaccaaaatgagactgaatttagcttattttcttatgctgcttgaatactttcatcgggaaataattcttgactttggaaatttgcaactttatggtaaatgtcttcattccataccgctttattcacacacagagagagagagagacagacttaaacactttcttaggttctctctcctttttatagatataaaactctagaaggcaaggtctgggtcaagtttctcaacatttttctgccccagcacatccaagccatgccctaaaattcagccagggagtatggtgaggattcttaaggccaggtcggggaggagagaaacaagtactgtgctgcctccatctgttttccatttgcacacacagcccctcgatgtacgagtctcaggactccaccacagtttccttctaacccagcccaactcaggtcccagttggtagtctttttttttttttttcctccaagagggagtctcactctgtcactcaagctggaatgtaatggcttgctgcaacctccacctcccggattcaagcaatcccacctcagcctcctgagtagctgggactacaggcacatgccaccacacccagctaatttttgtatttttagcagaggcagggtatcgccatgttggccaggctgatctcaagctcctgacctcaggtgatccatctgccttggcctcccaaaatgctgggattacaggcatgagccaccgttcccggccacgtagtcatttttgtaccccgtatgatatctggcagcatgtaacctttcctgccctttacaaacggagcagagcgtctcacttcagaaagcatctctctgtcctttacaagttattttcctttcctttctcttctctgcaaaggtcacagccaccaaaaggaagtgaagccatgattgtcccataactagagcacagcagaagtgcagatagctgggttgcttgcatttgctgcttaattttgtgaataaggaatttgttgtatcccaggaatgttcacattctcactggtaaagaagacatccccaagcagcccacaggtgggatgtataccattcaactcattggcttacatgcaaaaataattaataataataaaaatatcaagacctcttctccctgatgaggagaagactagaaaatcctggtaacagcctttgcagtcctctccccccgcacccctccagtttgctgaccctttataccccaccccccttttgcatttgaagttcaccaaatgagtttaagctaaattgtgccacagggtataataatcagtgttgtttgatagagatgaagccactgcttttgcttttcagaaggataatgtccggaagcattttatttagaccacccctgaaaggcattgattcttagaggacactaattagggatcaggagttacactggatttctttaaatgtgtgtaaaagcataaaaagctttgagaacttatgtgatacttacctatttcacatttatgtgtagatttcctgctggtcaccaaattcttacctgggagatatattccttgccctcatagaattcatagtttagagagcaaaactcatagtattataataacaaagtcatcatcataataaaataaaacaatgtattacccattttctctatgccgggtactattctaagtgcttttcatttattattttgtttaattcttacaactaccctatgaggctggtaaaattagcatcctcgtcttacagatgaggaaactgaggcacagaaaaagtaattacttgcataaggtcccaaagctaattattacaaagcctgattttaaccacaggtctatatctagaaatatatatataattttagagtattcggtaataactaagatttttgacaaaggtgggtaggatagaggaagcttgttcaatatcatgggaacatgtgaagaaaaatggggattatgtcttaagatgttgctagaaaattaagatctcagagggccttaatgtaccaggctaagctgtccagctttttatcctgtttgcactgagaagccactgaaggttttaaacacaaacgtgataagatcaacaatctggtttacaaagatcctgggaagcaatgcgaagaataagttgattttaaaccttgcagcagggtcagttaggctattgtgaaatccaaatgaagaataaagaaggcctgaactaagtggcagatgagacactgagaacaagagagaaattagagagataattaaaagacatacaaacagctaagatttgaagacttttgggaggccgcggcggccagatcacgaggtcaagagatcgagaccatcctggctaacacggcgaaaccccgtctctactaaaacaatacaaagaaattagctgggcatggtggcgggtgcctgtagtcccagctactcgggaggctgaggcagaagaatggtgtgaacccaggaagcagagctcgcagtgagccgaggtcgcaccactgcactccagcctgggcgacagagcgagactccatctcaaacaaaaaaaaaaaaaaaaaagatttgaagaccatgtgtggtatggggactaaggagaagcaggaaattcaggaggaaactaaggatctgacctgtgcaactgggtgatcacaagtaccattcaatgagacagggaataaaggagagacaaagccagctggggaaagaggactatgagtttcctattgggtgtgttgaattgtagattactgggggccaatcaagtaggaaaacccaagaaatgactcacatattgatctggacacagaaaggatggctggactaaagatgcagatttcggaatcatcacagtcaaggtattagctgacactgtgaaagtagatatgatcctcaaggaaaagtgtggcgcaaaccaaagacaaaaccctcgggatccactccattttacagtggatggaggaggcaaaggagggctgtccaaaggtagaggagaaatcaggaaagaatatgatagggctgtcaaattatgaaaaactgtcaaggtgtttcagataagagaagctcaaagtccatgcatgccatgcatggctgggcacttgggatattaaaaagcagttttactagagcagtggagatggtgaaatgtagggaggatgagctggaacagtgaatgaagattatttttttttccaagaagtttagttttcaaaggatagaaacctagagaaaaggagaaatatttgaaaggagtgctttttgtttctaagatggaaacataaaaatatgtctataagctgagatgagcatgccagaggaaagaaaaatggttagcaaaattacttggttttttttgtttgtttgtttttgtttattttatttatttatttattttttgagacgaagtttcgctcttgtcactcaggctggagtgcagttgtgtgatcttggctcactgcaacctctacctcccggattcaggcgattctcctgcctcagcttcccaagtagctgggattacaggcaccgccacgcctggctaattttttgtatttttagtagagacagggttttgccatactgggcaggctgatctcgagctcctgacctcgggtgatccgccggcctcggcctccaaaagtgctgggattacagacatgagctactgtgcctggcctggttagcaaaattataaggggtatcagaagcggaataggctgagccagagttagaaatgacaatttctttttctttctggtttttttttctttcttttttttttttttttgggagacagagtctctcactctgttgcccaggctggagtacatgggcatgatcatggctcactgcagcatcagcttcccaggttcaagtgatcctgccacctcagcctcctgagtagctgggactacagacacatgccaccacgcccggctaattgttttttgtttttttttgttttttttttttttttgtatttttagcagagacagggtttttgccatgttgaccaggctggtcttgaactcctggcctcaagtgatctgcccgcctcagcctcccaaagtgctgggagtacaggcgtgagccaccacacccggcctgatcttttcctattttcagtcattaatttaccaaagatttaaaatatttattgagcactgatgatatgccaggcactgttttcagcacgaggtaataatagctaaccctatgtgtcagacactgttgaaataattgttaacagttaatccttatgacaacacaatgactttggtactgctactaaagtccattttataatgcataagccaatgtacagagaggttcaataacttatccaaattcacacagatagtaagtagcagagctgggtcccaaacccagtctgcctctgaggcccgggctcctggctgctgagcccctccttcccccgttctcatcagtcagaagtgcagtcttatcagtgaatggatgtaaacatctactacttggtaatcaagagaggaaaaaaggaaggaatgctgttaaagactcggatgcattttgcagggttttgctgagctctatccagtgttgcccaaaggaaggaaggaaaaacctaatcagcttgtaatgatgttatcagtgaggcagctatgacaaagaggtagaggctgctctgttccctgggctatggctctttatttgtttgcttatttagctactcaagaaaaaaatagggagtctttgaaaaatttgttactgctgattggaaagaattgctcatgtcccacctctctgagcgtatttatgcgaggtgctattttgtatgggaatgctgttaaccccgatgaatggaggagcccacatctgatttctctgaatgcaagttcaatcttcttggccatgcccatgtatttttgaaaaaacactttagtgtttgtgtaacagcaggaagaccagtgtcctggagcacagcgaccaagggagagaattgtgggaagactaaaagatgtatggatgggggatgaggaggataggggagactagaattagacagctcctaacactgtattataatgacttagggttttaataagaatgagatgggaaactatgaggatgaatagaacctgtgcattaacatatttaggccaggcatggtggttcacacttgtaatcccagcactttgggaggccaaggcaggaagatcacttgagcccaggagtttgagaccagcctaggcaacatagtgagacctcatccctacaaaaaatagaaaaattagccaggcgtggtggtgcatgcctgtagtcacagctacttgagatagattgagcccaggaggggaggctgcagtgagccatgatcccatcactgcaccccagcctggtgacagagcaagaccctgtctcaaataaataaataaacaaccctgtctcaactatatatacctaatcaacacatccatctcaacaactattagaaatggttgtattataacttaggcaaattgactaaaatctcaaagaattttttaatatttagatttttaaaaaatattgggtccacgtggttttgacttgtaaggggaagttctttgaacttggaaataatgttacttcaatcagttaaaccattgtactgagcactgattggacacattattttcaagcttcccttattaagcagtattctgatcatgggtgcagtatctgagttcctctgtattgaaaaggagaaccctgcaaagcaggcaaatggattctggtcaccaaaaaggaatatcttccatcgtgtattcagtagcgttagaggttgtaagtcagtttcctatatgtggttatggtgagctttccagggacagtctggtcagtgtgggtgcactgacagtgtgtttagtgagacaaagtctaccaagagtcaccgctctagggcagcacatccctggtaaggtatcttcaccttctgcagtcaactgtggtttgggcatctctttttcaaattcaaatgtattcatttgctggggtcaccataaagactctagtgccatcatataagatacagacccttgaaaatatggatcacccacccccattcctgtttagaaatattgtgataaaaggtcaatgttctccctttcagagatctggtactgcctgtgtcattatgaacaggggctctgaaattgcggggtagtatgttataatgaacacagccatctagagaaggatctggaatatccttattttaaagaaaataattatctagattgtatacacatacatacacacacatatacacacacagagaacttatagcccctcaggggtcagtggatactaatttgagaaacaaaccatttcttgtctaaatcagtgaatcagtggttttcaaactctgggactctaggtaggaaggcaaaagactaacttgatataccttgttcaagttcatacttctcagaccacctgagctctcaccagcctccctcttccttttagtgtttctgtgcttcttcctatctctatcaggcattctgataatcacctcctgccatgtgttattatttagccacttcatttttgcctagatttaaagctttcagaaagtattcaataaacaagtcaagtctccataaagtgctcttctgaccccgaataagaagccactgaatcagtttgtctatgctgtcagttgttccatctttcctttgtatcttgaaaagttctaagaacaagatgacctgataaaaaataaagcactttggggagctaacaattttatgggcagtggtattttaatttatacctaagtcttatgctgagaattatcaagggcaatttttttaatatagagaagaaaaaaacctacttttgccagctcaaaaagaaaggttaaataatgattttgcttctgtttaggatagctgttagtaaaagtgtaattatgatgcttcttttttaaaaaaataataattacagatgggatacacaccactgcatgtgggctgccactatggaaatatcaagattgttaatttcctgctccagcattctgcaaaagttaatgccaaaacaaaggtaagctccttccttttttgtttctgccagaatcatttatttttgcttcaaaggaattaagaatcatctcttccatcttccttctacagaatgggtatacgccattacatcaagcagcacagcaggggcatacgcatataataaatgtcttacttcagaacaacgcctcccccaatgaactcactgtggtaagcgctcagggccagctcaggagaagagggaggagatagatgggcctggactctggtgtcttcttacgtttttcattgtactttcatgaagaggcataaacagagcattcagtagaatgaggaaagaaggacaataaccatattgttctgagctgttcagagagagagagatgattagtgttttatatgtgaaaactacctactgcattgtcacctagtaggaagtacacatgtaagaaaaaaaaattgtgttggtttcattgattgcttacttagaacgttaaaaagcctcttggattgcatgtgtagctgcccagactttgctgtacaaacaggttaggtgggttttgtgcaaggtatgtctctaatgaaacacttatttgtgtatgacagtgggatgggtctgatgagacactcaccttacattttgtatcagcaaaaaaaatgtggaataaggcttgctaattcctcactcacattttccttttgccagaatgggaatactgcccttggcattgcccggcgcctcggctacatctcagtagtggacaccctgaagatagtgaccgaagagaccatgaccacaactgtaagtaaggaatgcagaaccttgttaccctaggagccagctttcagccagttttcttgggtttttctgagatgaatattttttcccattcataaactaagcaccatgttttaaaatacagtcacctcattgttggtagtcaggatagcaaaactcttattgctaatatgaataaaagtttaaaacactaagaatacctatttaaaagatgcatctgtagctatagagtttttacttccatatacagctaaatgtatttatttatttgtttgctttgatataacaagttcttaatgaaatgatggtgaaggcagaaattttttaacatccttccttggcagcgtaaagaaaattgaaaactctaagttggttccttaaaaatgttttaatgcacaaatggtacatggatacattatcattcctgtaaaaaaatgtttacattgttttaaaaaattccagatgggatcagaactggttttgcctgctactgtcactcatcttctgtcctattggagttttcataagaaacacaataggctgttttgttaaaatttaaagtggatctttaccaggaggccctattgcatcaactacatttttacaagctgcagcctctaggataagtcatttctttccaaccccatctggtacctttgaacagcattaacatttggtaactttggaattaaaagcaaatattacatgatatcagaggcttatttgagttattcctgactccatgactcaacacatagacctgaggttgactcttaacaaagtaaatataggactctggaacattttgaattatcagctctgtccccttttctcttcgaccaccttccaacatgaaggagaaaatggttagcatctgcaaattagtttgtatacccactgctttttgtgaaaaacatgggttgaaggtctctgtaactacctgcagtttgagttatctggcagtgttactcaatgtataattcttagtctttagaaactaaaaaacaagcctgctgattacgggagaaaaattttgtaatttgcaaaagagaaaacagttgttttaatggaatagaacaatgattgtcaagcagcacccattccgaacttcaagttatactttgtctaagagagaaatttccacatgttgctttcatacacctcttgaggattttattatattaaaatctatcattaagttctcaaaaaaagtgttcaaaccaataatgtttattacctttaattttatatcccatgtagctctatctaggataggaaaggagaagagaacaaactatttaacgatagccaagtgtcacaatgctataaagatttgaagtcattgcagtaaatatataatattaatacttctatttcaatgttaaaagacttgagacatgtaaaagttcaaaatacacatcttatttggttgaatgtaaatggctttctcacccattacaaaatttcaaaacttttcttcaaaatcaaaaaaaagctttaagagaaagtagagttaagaacaaaattaagttacaacttcaaaaaatcaactgaaagacagagaagggtctcagagctccatcaggttcccatcagaagacagaatgtgtacaggaatagtgccttttcactctcaacatcatcagctgtccttgttgatgactttctgcaaaagagagaagacactatgcatgctaattggaaaggtccagtttgcctagtgaagaaaatgaggcttccaccaaaagaagtgttcacgttgattaaaaaagagtccagagaagtctctaaaacttcgcccagcattgtggtatttggtacattatctcaagctgagacaccaccttgtcagccttgctttagcggttacatgtaaactagcttagacaggactgatgtaattcagggtggagtctatgactttaagctaataactctagctcagcctccaccacaggcatgatatttgtatagctagttactgggactccagcagccattgactctataaacagacttcagtttttcaaaacaaaaagagaatgtcttttccatgtgagtaaaatacatgatgtggcaatgctgagaaagacggtttagttaattagattacaatcaaaacagcataccaaactgaatggatagaagctgatattcaaaagatgtgaattgtatctatcaaaactgcattgtttaaaatacccaattacttcatatgtaaggagcagaacacctctagcacacagatattggttgctaatactattttctactaaaagcaaacagtgctccttggagaaatggctgaatctaaggatagcacagtaaatatataagatgagcctggaacatcttagagtgtcaaaaagtaaggaaatgctcctccctcccccaacaaaagtaaataaactaatacagaggcacaatggtagggggtatgttgaagggacatatgaattaactaaaagagttcccaatggccatagctggaacaatttgagcaaaaataaataaatataatagtcttgaagtatagtgcaaactgtaaaataactatccatgaattcatactattatacataagtaattcaataaatggaaaagaagacacaaatttctcaggcaaaagaattccaaataatgtatgaaaatacttcactctcgaagtggaacataattccccactgcttacatgtgggctgaacatagtgattcctttgcaaagaaaacagtatggaagcagggggaaatagagtaactttacaatggagaaacctgacaaatactgcttcagacatatgatcaagatcaacatcaacaatgataagtcatgttgatggtattgtacccttgatacaatgtgatgaaatggcacttttcctctgtgatcttcctccgtaaaacatacagccccagtctattaaaaaaaaaaaaaaaaaaaaaaaactatgagacaagccccagttgatggacatatctgactagtatactgcaaaactgtcaaggtcatcaaaaacaaggaaagtcaaatgcaaatcaagaccacaatgagataccctctcataccagtcagaatggcaattattacaaagtcaaaaaacaacggatgctggcaaggctgtggaaaaataggaatgcttttacactgttggtgggcatgtaaattagttcaaccatcatataagacagtgtggcaattcctcaaagacctagacccagaaatatcagttgacccagcagtcccattactgagtatatacccaaaggaatgtaagttattctgttacaaagatacatgcatgtgtatgttcattgcagcactatccacaatagcaaagatgtgaaatcaacccaaatgcccatcaatgatagactggataaagaaaatgtggtacatatacaccatggaatactgtgcagtcataaaaaaggaatgatatcatgtcctttgcagggacatggatggagctggaagctgttatcctcagcaaactaacggaggaacagaaaaccaaacaccacatgttctcacttacaagtgggagctgaacaataagaccacgtggacacagggaggggaaggacacacactggggcctgggggtggggagggagaacatcaggataaatagctcatgcatgcgaggcttaatacctaggtgatgggttcataggtgcagtaaaccaccatggcacacatttgtttacctatgtaacaaacctgcatgtcctgcacatttaacctggaacttaaattaatttttttaaaaaaacaaggaaagtctgagaaattgtcacagcccagaggaacctaaggagacacaactaaatgtcatacagtatcctcgatgggatcctgaaacattaaaaggccattaagcagaaactaaagaaaaatgaataaaatataaactttaataataatgtatcaatgttgattcattaattgtgatattttccatgctaataaaagattttaataataggccaggcgcggtggctcatgcctgtattcccagcactttgggaggctgaggcaggtggatcacctgaggttgggagttcgaggccagcctggccaacgtggtgaaaacctgtctctactaaaaatacaaaaattagctgggcgtggccatgcacgtctgtaatcccagctactggggaggctgaggcaagagaatcgcttgaacctgggaggcagaggttgcagcaagccgagattgtgccactgcactccagcctgggaaacagagcgagacttggtctcaaataataataatactatcaatgaagattttaataataaggggaacttggtgtggggtatatgggaactgtctatactatcttcacaattattctataaatctcaacctcttctaaaaataaaagtttatttttaaaactgctccattgcagtattacatgctggaaaagacatcaaataatggttgatttcaacacaataattggggataggggtagaaatcacatttaccaagtattatctctaagaaactatgaatttgtacctttttttagttttaacaacctggctttttttcagttgtctcatttaaacgtgtatcttcccttgtaccattagtgtctcatatgctgagaattaaaaaaacaaaacaaaacaaaaaaaaaactcacttttaaactaaggtcattaagattttcttaccagtgatgctaacagtgtcttttggatggatataatctaagattttcttaccagtgatgctgacagtgtcttttgggtgggtataatctaagttatcaaagagaaagtaaaagaggcagtaggcatttgctgcataatatactgttctttaaattttgggggaggctaaaatgatctgccaatgcatcaccttttaagtattttttcatacacaatattgtaaagattattgttgtaaatattattttaatattttgttttatcctatgaattaaaagtacatataagaggagaacacaaaatagacggaaagcttggcacaagtaatagagacatatttcttgcagctcatttggcttctcttcagccgagacctttcgtggaatggggcggcagattcatcagaccatgaaaaagtatagcagtggagtaggaggggcagaatcttctcttttcctttgaaaagctttattagagacctaaatcttttaagctgtggtactttgccactagaattctttcattttgtactcctgtgctttgtatatggtgacaacctttgtgacactaagggacaacaattttgatgttattttatatgtgggagattcaagatattcaacacatacattccacaagaaactgattaattcagagataaatgaaaagacccattaaaatgtacagtctgctcacactaaaatgactgcttttttgttactagactgtcacagagaagcacaaaatgaatgttccagaaacgatgaatgaagttcttgatatgtctgatgatgaaggtatgaaaatgttctttgagttcacaataattataagtgactgtgtattttgtttgtttcctgaagaaagtccattgcaaaaatgtttatcaggaatattgaaacgttttgttgtaatatcaagagtatgtatttttcatccacttatattgttcacttcaatcatgcagttcgtaaagccaatgcccctgaaatgctcagtgatggcgaatatatctcagatgttgaagaaggtatttgtaaatttttattgtgatgaaacttaactactaccaactttatctttcatttcttatctttgaaatataatatttccttgagttactaacttttcatattatcttgagattattaatttgtgtattatttaaataatgtatatctggtactactagctctcctttttaagtctctttgaatcctctttccttgaacctgtttcctaactttaaaatataaaagtgtcactaattatctggattacttgccttctctttgtttctatcgaacagaatactgatgcttttattgtttgcatctgaaatctagaaagggaaaactggttaatgtttatgattacaatattttttaaaacaagcgaagtttccttataggaaatccttttaaatgccctgagatttgcccattctgctaaactttgtagaaaaagcagcttttgatcttgaaatgataatgaaaacaacctgaaaaaaaaaacttttgaaatagaaattttcaataatgatttaatgaaagagatcaaaatattattgtagctatactttatgtgttttcagaaattggtttctgttttgcttaaaaaccaatactttgaccaggtcatgatatacagatatatcaatgaatggcatctttaaaaggtccattggaaaacaagcatttttatagtgagtaaatattgtactgatgacacattttggagtgtcactgtaataacaaaatatttaccatgggaaaattatatttaactgtttttcttgcatcatttgactctcccaaatgatgggagatcatcaaatacagtctaccctattatgacctccatttgccacctgtcatgtagtagctttcttttggttagtcttagtgttgctagtctttttttgcctttaagtaatcttccctattttaattcatatgatttctttctttgagttgcatgcatttcattgggaacctaaatagtggaaaagcttgcctagtctgaagccactttaatcttttcgttatccaatcaatgacttcccactataatgcattgtggccagggactgcacaccccagtgagctaatgtcctgctggtcatttagggacctcggaggatctggctgaatgtttgtaaatgctgttttgataaatgctaaaggcttttactcagttttctttctttttctctgaaacatctgctatacatttacctcccttctatccccaaatggataatatttgttatcgtctttaggacttttagaataatatacctactgtcatattatatttcattgccttctcatacatttcagagtaacttctgtgcagaagataaaagaaaaaatgatattcttacatagatgtttacacacacaaaacatgatgtcaaaagtatgtttgtcaaatgaaattattaggaatcatggtatgacaatcatagacctaaaaatttactgttcattaacgaaatatctaaaattatccccattgatgagaggccaagtttgaatggactaacagccttatacatatggataaccaaataatttcaaaaatggagattttgaatctcgaaatttgaatttaattgacctcgttacttaactagaaatgtgtttatctcagcttgggaatttgaaattggcaattttaaattctcattttatgcatcttttctttaaaatctttggcccttactttaatgtgtccagggctattggaatcaaatggcttttaattttgtggtattgccgaatttaatgttgaaaaggattccttaaaggtcactcagtctgagcaaacatctgctggaatctcatctgcttaggatctcctgtgcccaagcccttcaaataatgagaattctttaattcctaagctgcatagtccatttggacaattctgtctttaaaaatccttcatgttattgaacttcctgtagcatctactcattgattcaagctttggtgtatttgaccaagttgatgggaagactacattctatgtagtattttgaacaaaagctgccttttctgtgtgacaatctttcagatatttaaaaatgctttttctatttctttttagttttttttttttttcaggtatatcattgctacctccttctattgttcccctcagcaacctggtcgccctctcctgtgcatgtttcaatatgtctgtgccatctcaagttgaggtgaccagaactgaacacaatatttttagtctcgtcaaagcagagtatagcaggactattgcattctccatggaagatgttaaaagtctatttttgaagattaaggttataatacacttttaattcaagtcatattagtattactgtctgctaaggtccctaaattttgcttacaagagctctagtaagccacatttgccctattatgtatttatgttgtcctctgctgcataaattagcatttctaactactgcaaatcccaaaacaaatcattttgaaatttggattctaaaaggacccctacaacttgaatgataattttaacttctgactcatttgcctgatagtcttgccagagctttgattgtcattttagttagatttagtgttggccatttgagtaagctcctatgcagctgtggcaaatgttcatttccatgaagccataggcatgttgtgagtataactatctacaagaactagtgagagatcatcacattggtatccccagacactaaagaataacagcagcttttaaaagcaaataaaaataataagcaatataggctgccagtttgtctcaagaaagaaaatgaaaatgagtttgtaataagggaaaataaaattttaatctgattctaaaaataatctgctgtaagtagatatttaaaatttaaaataaataagataaaaaattaaaaagcaaaagtaaaataaatattaaggaagaaatgtcaagagtagtctctctcttctttttcattctcttttcctttttcttctttgctttctccttatcgtcttctctttcttttgtacactatgagaaactagtgcaagtgaaagaatgtttggattcatttctcaaaaaaataaaaattaaggaatacaagactagacaatgttatcatttaataaggtgggagaacaatggggccaagttgcaaagttgaacacaggtggaagcatcagcaaagcagagccgtagaagaagtcaagcaactttgtccaaggcagggttttaagctcacattaggcaggtgggggctaagcagagctcctcagagggtcagatgcatttgtagataccttactgctctactgtctcctgttccagaaaatacctatgcatataacattcataaaactttaatatacgtacaaaactagtatcttgattgtagtgctagtttgattcttatgttttgcaattcatattttgtaattgaaaatatgaaagagtgtgtgtatagaagaaagaagagagaaggaaggaaggaaggaagaagaaagagaaaggagagaaagaaaaagagggaaaattgagattaaggttcaagtgattgagtttggcgtctcctcccaagggattttacattggctttggttcaactctgatcttaaattgcaactgcctataaaatgtattttataaattggggcaggggggtataaaatgttattttagcttgtagaattctagtggattggagtgtagttacagatcgaaagaactatagatgggagataatgagaagtggaattaagccatgcaaagtaaaaatctaagaggcagctctatgaaatatgactctactgaacaggtttaggagacagcagctggtgaggcaaactcctgctaggaagaattttctaattctaagctactttcaaatttgatagggctgaaaaatatctctctgaatcaaatgcagacattaaatattaaaagaaaaataagaggctaagtatacatgtaaaaataatatcaagtaggtataagtttgagatataataaagcaataaaattttagcagataatagagtgacatgagggataagaagaatcatgttcagcttcgtgccaaatttggtggccagtggaagccacagtaaattaaaatccaccgatttcaaagaactgaatgggcaagttggagtcttgtaagtctattcctgccattacactgatgaggtaggaaagcccaaatacacattgaatggtctttccaatgaggtttgtggcagagctggacaagaagactggtctgacactctgtagttttagatcatttcattcccctgcccccaaagtctagtcaagtaaagcactgggagtagagaaggaacacatagatctgtaactggttgtgatcaattacttgcaaacaacactgcatagatcatctctttcattgctattccaacttgaaatgtttcttatatatagaacccaagaatgcatatttttagcttcaaaaaaaggaggtgtgttaaggaaaaggaacaaatcatgttcttggaaactatcacaaggtaataagaatattttaatttgtaataatggatacataataattgtacatatttatggggtatatgtgatattttgatacaattatacaatgtgtaatgatcaaatcagagtaattgggatatctatcacctcaagcattgatcatttctgtgtgtttggaacattctggttccacccttttaattcttttgaaatatattgttaactataaattattgttaactataaattattgttaactatagttgccctattgtgctaccagatattagatcttattccttctagctaactgtatttttgtgccaattaaccatcccctctttatccccgctctttccagcctcctgaaaccatcattctactttctatctccatgagttcaattttttttttcagttcccacatatgagtgagaacgtgctaaatttatctttctgtgcctagcttacctcacttaagataatgtctccaattccatccatgtttttgcaaaaaacacagaatttcattcttttctgtggctgaataatatttcattatgtgtatgtaccatattttctttatccattcatcagctgatggacacataggttgattccatatcttggctactgtgaatagtgctgcaataaacaagggtgtgcagatgtcactttgaaatactgattttcttttttttatttggatgtatgcccagcagtgggatttctggatcatatggtattctattcttagttttttgaggaacctccatactcttctctatagtaactgtactaatttacatttctaccccatagcatatgagggttctcctttctccattttctgttagcacatagaaatgatactgatttttatatgttgattttgtatcttgaattttactaaatttgtttatcagttctgataggtttttggagggatccttatgtttttctaaatagaagattttatcatctgcaaataaggataatttaactacttcttttctaatttggatgtcctttatttctttctcatgtctaattgctctggctagggcttctagtactatgttgaatgaaggtgatgaaagtgggtgtcctggtcttgctccagatcttagaggaaaggctttcagtttttccccattgggtatgatactagctgtgggcctgttgtttacagcttttattgtattgaggtatgttcattctatactacttttttgaccattaaagtatattgaattttattgaatgctttttcagcattaattaaatgatcatatggatttgtcctttattctttggatatgatgtatcacattgattcatttgcatatgttgaaccatccttgcatccctgggtgatgaatcccacttgatcatgttgaatgatctttctactatgttgttatatatggtttgctagtattcgaagattttttgcatttgtgttcatcagaaatattggcctctagtttccttttgtgtgtgtgtgtctttgtctggttttggtatcatggtaacactggcctcatagaatgagtttggaagtgttccctcaaatttttggaataatataagtaggattaatagtagttcttttttaaagtgcttggtagatttcagcagtaaagccatcaggtcctgggattttctttaatgggtgactttttattactacttatatcttgttattcattagtagtctattaaagttttctatttcttcatgattcaatctttgtaggctttatgtgtctaataatttatccatttctgacaggtttcccaatttattggcatatagtagttgctcataatagtctctaatgagcctttgaatttttgcactatcagttgtaatgtctccgttttcatccctgatcttatttatttgggtcttctcttttttagttagtctggttaaaagcttattgattaccttttcaaaaaccaactttttgtcttgttgatcttttgtagtatatttttagtctcaatttttcctactctgatgtttattatttattttcttctataaattttgagtttggcttacttttgcttttctaattctataagctgcctcattcagttgtttattcaaagtttccctgcttttttgatgtaggcatttattgctattaactgctcttttagtactacttttgctgtctcccgtaggttttagtgtgttgtgttcccattttcttttgtttcaagaaattttaaaaattttctttttaatttattcgttgacataatggtcgttcaggagcatattgtttaatttccatgtgtttgcatagtttccaaggtttctcttgctattgatttctagttttattccatcgtggtcagaaaagagacttgacatgattgcaatttttttttaaattttttgagacttgttttgtagtctaacatgtggtctatccttgagaatattccatgtgctaaggaaataatgtgtattttacaggtgttggatagaatgttctgtgcatgtctattagggtcatttggtctatggtagattaagtccagtgtttctttgttgattttctttctagatgatctgtccaatgctgaaaatggggtgttaatgtccccacctattgtattggggtctatctctctctttacctctaataattgctttatatatacgggtgctccagcatttggtgtgtatatatttataatttatatatccccttgctgaattaattcctttatcattatataatgaccttctttgtctctttttgcagtttttatcttgaaatctatttcatctaagtatagctattcctgttccttttttggcctctatttgcatggaatatcctttattttagcctgtatgtgtctttataggtaaagtgagtttcttatagacagcatatcgttcagtcttgtttttaaatccatttggccactctatgtcttttgattagagaatttagtccatttaaattcagcattatcattgctaggtaagaacttactatgccattttgttatttgttttctgattgttttgtttgtcctctcttcctttcttccttcttgtctttctttgtataaaagtgatttttttttattggctgggcacggtggctcatgcctataatcccaaaactttgggaagctgaagcaggtggatcacttgaggccaggagttcaagaccagcctgggcaacatggtgaaaccccatctctactaaaaatacaaaaattagctgggcatggtggcatgcatctgtagtcccagctacccaggaggctgagttgggagaattgcttgaacctggaaggcggagattgcagtgagccaagatagcaccattgctctccagcgtgggtgacagaatgagattctgtctcaaaaaaaagaaaaaaagtgctttctcttgtagtatgtttaatttcttgcttttaatattttgtatatctattataggtttttgtgcttaccataagacttgcaaataacatcttataatcaattattttaaactggtgacaatttcgttctgattgcaaagaaaagaaaaacaggcaaaaagaaaatgaaatattccacactttaacttcatcctccccactttttgacttttgttgcctctatttacatctttttatactatctatctcaaaagttgctctagttattatttttgataggtttctctttttgtcttcctacaaaggtatgagtggtttgtacaccacaattacagtgttagggtagtctgtatttgtctgtgtacttacatttaccagtgagttgtatgcatttaaatgatttcttgttgctcattaatatccttttctttcatactgaagaactccctttagcatttcttataagataggtctggtttttcatgaaatctctcagcttttgtttgtctgggaaagtatctttgcttcttttctctcactgcctttaggattctttctttatccttgatctttgagagtttgatgactatataccttaaggtagtcttatttgggttgaatctgcttgttttttggttttcttatacctggatattcatatcttactctaggtttgtaaagttccctattattatttctttgagtaaatcatctaccctgatctccctccctccttccctgccgctgcctctctctctctctctctctctctctctctctctctctttttctctctctctctctgtctctccattctctttaaggccaataacttagatttgtccttttgaggttattttctagatcttgtaggtatgcatcattcctttttatttttttgttttttctgctgtgactgaattttcatagagcctgttttcaagctcattaattctttcttctgcttgatccattctgctattgagaaactgatgcatttttagtttgtcaattaagtttttcaactcctgaatttctgcttgacttttaaaaattattttaatctctgttaaatttatctgataaaattctgctctttgttatcttaaagtgcattgagctagcttgggcaacatagggagactctgtctctataaaaaataaaaataaattagctggccatggtggcatacacctgtgatcccaagtacttgcagtgtttaagtggtataaacacctgggcccagaaggtcaagactgcagtgagctgtgattgcaccactacactccagcctgggcaacagagtgagaacccctttaaaaaaaaaaaaaaaaaagccgggcacagtggctcacgcctgtagtcccagcactttgggacgctgaggcaggcagatcacctgaggtcaggagttcgagaccagcctgaccaacatggggaaaccctgtctctactaaaaatacaaaattagccaggcgtggtggcacgtgcctgtaatcccagctactcaggaggctgaggcaggagaatggcttgaacctgggaggcggaggttgcagtgagccgagatcatgccactgcactccagcctgggcaacaagagtgaaactctatctcgaaaaaaaaaaaaaagattcattgagcttccacaagacagctattttgaattccgtatctgagaggccatatatctccatcactccaggactggtcactgatgccttatttagtccatttggtgaggtaatgttttcttggatgtccttgatgcttgtagacatttgttgatacctgggcattaaagagttaggtatttattccagtcttcacagtataggcttgtttttagccatcctttttgagaggactttccaagaattcaaaagggattgagtgttgtgacctaagcctatggtcactgcagccatttcagcactagagagtgccctaagccccggaatgctgcaactcttacagactccttgatacacagctttggtagattttgggaaaataagggagaattccctgggttaccaggtaaaaagtctctcccacttccctctctttctggcaaaggaagtcagtctctgcaccaggctgcctggagttgggggagggataatgcggtcactctaatggccatgacagctggcactgcacagggtcacatgtaaagccttgtagcccagcacagtgctggggctcaccccacggctgtagtcactactgcctggctgtcgctgatgtttattccaagccaaagccactctattcagcagaacggggtttgtcccatcaggacattggattccctgctggtccagcgtgggtctagaaacactgtccagaaacaaaggcatggaatcaggaggtacaggagtttccctggtgctttattttagtgtggcttagctggtacccaagttacatgacaaagccctctgtattcttccctctcctttctccaagtgaaaagagtccctgagctgcactgcctggaattgggggatgagtgacacaggcacacccttggccaccacagctggtgtcacaactgaagtctaccacctctgtattagtcagcattctctagagggacagaactaataggatagatgtgatatataaaggggagtctattaggagaattgattcacacaatcacaaggtaaagtctcacaggccatctgcaagctgaggagccaggaaggcagtccgaatcccaaaacctcaaaagtaggaaaaccaatagtgcagccttcagtctgtggccaaaggcctgagagcccctggcaaatcactggtgtaggtccaagagtccaaaagctgaagaacttggggtcagatgtttgaggcaggaagcatccagcatgggagaaagatggaggccagaagactcagccagtctagtcctttctgtgttcttctacctgcttttattctggccttgctggcagctgattagatgtgcccatccagatggagggtgtgtctgcctttccagtccattgactcaaatgttaatctcctttggcaacaccctcacagacacacccaggaacaatactttgcatccttcaatccaatcgaattgacattcaatattaactatcacaacctccaagaccagggtagcaccagagcttgtccaaggactgcactccttgggtcctgattgctacctaaatttattctgagcctcaagccactttagtcagccaatggtgaagctggctgggactcagtttcctcttgctggggtggaggattcccctctggcccagcactgtcctaaatgctccttccgtgggcactggcagaattctgtcctgtactgtgttccactgtgacagggcagtgctgagctccaatgcaatgttgcacactcattttgctctctctttcccaggcccacagattctttctctatgctgtgctgcctggggctgggggaggggtggtgtagataatgcaagactgtctttctgagcttttcaatgcctctatccttgatattacattaaaatcgggtattgtgattgctacttaatttttttgttattatggaagtgctttcttgcattgatagttgttcagtttggggttcctgtgaggggaaaatcactggagtgttctattcagccatctttctctacctctcctcccctttacaataatgataaatatttagagaaccttcctctgtttcttttggcaaaagaactatatacaccaagatgaaaattcaagtaaaataaatataaacataatttcaaatagattttaactaaaagccagtagttttagtaaacgtatcagtgtattctcgttaggaaagaataaacagattttggttgtttcattttgttttgttttgagacagtctcactctgttgcccaggctggagtgcagtggcatgatctcggctcactgtaacttccgcctcccaggttcaagtgattctcctgcctcagcctcctgagtagttgggactacaggcgcccaccaccatgcctggctaatttttgtattttttagtagagacaggatttcaccatgttggccaggctggtctcaaacttctggcctcatgtgatccacctgccccagcctcccaaagtgttgggattacaggcgtgaggcaccaagcctggtggaataaacagattttgacttgacacaatccaaaactcaaaaaagtaaggtgaattactttgggaaatgtgaaggtagatctgaagaagaccaccaggaaaagaccagttaggacctcttcttgccaaatgtctaggactctcctgctaccctaatttcctaatcattctaaataaataggactgttatgttattagcttaatagatctggaaagaggccatggagatcaggttgccctcaggtgattcaagggtttggtttcattaagtcactgttcttagcagcttcagaaattgttcttcacctgaaattttgttgttttacaagaacctcttatatcatttagccttttgcctgaagatttctctgcttacaattggcctttcaaatcgatgttacataattgcttgtatctctcagggataaagccaaaatggtaactttaaaataccagaagcaaagactaaatcttattctctgttttatcgcaagaacctagtatactgcttggtacacagagatcttcaatacatgtttgatcggttgcatcaacatgaagtcatactcaagggatagtttagcaggtttctgagatgaagcaagatgaagattgctgacaatgctaccttttcctttcattcagctcctttttactgagacagtcctaggctatgtttaagttgataaacagctttataatgactctcccaaagcatatctgcatctcaaggaatagttgatgaatttaaaagaattaccagctaaagaagaagatctgtggactgggacaagggcctttattctaaagcaaagtctgttccatcattggtatcctgtctttggaattagaattatatagtgattatcacccacactatccacttatccagctatgtacattttcatttaggttctgatatcttaagtcaccttaagatacctaaacataccccttgaaaatagtgtcttttctcacccttctccatctcaataaatggctccatcgcccaaggcaaaatctgagttttatgcaatctgtcttcccacagcacttctatccagtccatcagcaagtcatatcagtcctactttcagaatacatctcaaatctctcttctcttctccatctccattttcaccacccccatccaggccaccacatctctcacatggaatactgcaggagcctccttacagatctccagttcttctcttacccagtagactcagctttctccacagcatccacacaagcctttaaacatatacattggatcatgttattccactccttagcttaaaaccatccaaagcttatagttaggcttttaagatttattcatactgctgcatataattgaacttcattcattttcatttctatacaatattccattgtctgcctgtaccacactgagttatccactctactgttgatgagaatgtgggttgtttcaagtttgaactgttgttacaaactttcttatataagtttcctggtacacatatgcatacatttctgtaggatgtaaacctaggagtataattgctgagttgtatattatgtgaagacaacagaattcatcaaaaccagatgacaataaactatgcttgtaaaattagatactgagatttttaaggaaggaaaagaatatatagaaagcaattaccttgaggaggtaagaggggcctgtgtttggggtgggggatgtgggagtcttctgaggtgctgatgatgttctatttcttcacctggatggtgtttattttataacagtttgctaaaatgtatatttatattttatattctcatctgtgtggttgccgtattttgtaacaaaagtaaccaagccacacaaataatataaatacacccttaaagtagtacaaatacaaaactaaaacccacgcaaggctttatattgcatttagagtaatttcagtagtttgccatgattagtaagtcctgtgtgatatggtccctggctaacccctttccattctcctttcacttatgcttttttatttcatcctaatactcatctcattttattagtcattaatttcaagagtcagcagactttttctatagagagccagtggtaaatatttttgaatgtttagtccatattggtctctgtcacagctactaaactctgcctttgtagaacaaaagccaccagagataatacctaaatcaacaggcctgattgtgtgatactaataaagcttatttacagaaataggcaagaggctgggtttggcccatgggttgtagtttgccaactcatggttagttttttatattttctttcaaactagactagtcagtgccataggatcagagttgtcctggtgtctatcataggtcttagggtgtatacatctgtaccttcattcatgaatgtatctactggcttaattccacacatttacctgtgtctctgtcccccctcaggattccatgtaaattaatactctcaccatcagaaacaaggtatttaccatgattgaatctttctatgtgctaggcattaagctagacacatttcatgcattatgtaatttaaccctcacaatgattaaattggagccattgtcattttcatttcatagatgtggaaaataagtttcagtaaggttaaggaacttgattaaggtcacacaacatcagtgctggagctgatattcaaatccttgtacttctaatatagatgttgtctggtaatttagataagagccccataatggttgagttattgttaagtttgaatacctatgctagtctgttttgcattcatatgaaggaatatctgaggctgggtaatttataatgaaaagaggtttattttggctcacagttctgcaggctgtacaagaagcatggtggctgaaacagattgtaattttgaacacttttttttttcctctgcattgtatctgtccttgcccatccatctgcttctggtaagacctcaggatgctttcattcatgacagaaggtaaaggagagttaggtggcaagagaggaagcaagagagaggaaaggaggaaacttcaattatatacaacagtatgaatgaatcttaaaagcctaactaagccaggctctttttaacatcacatctcacggtaactaatagagcaagcattcactctttacagaggggatggcacaagccattcatgggggatccacctccatgacccaaacacctcccactaggccccacctccaacactggggatcacatttcaacaagagatttggaggggatagaccttcaaagtatatataatgacatatgtgaaaagcatttagcctagaacttggcatgtggtaagaactcaggaaatgttacttacttggtgctgtatctttgttacttctctcaaagtattcaacagcattattaatactatttttactcctaatttccattatgtcctaatttaataccctaatttaaagtactattagtcctaattatattaaggagtcagtctcaaggagtttaagatatttgctcacgttcacacagttacagaaactggaatttgcatttagaattttttaccttagactttctactcgagattctgtgttagtctgttttgcgctgctagaaagaaatacctgagactggataatttatatatatatatgaggtttatttggctcatggttctacaggttgtacaagcatagcaccagcatctgcttggcttctggtgaggcctcaggaagcttctattcatggcagaaggagaagggggagcaggaatgtcacatggcaagagagggagcaagagagagaggaggaggtggcagtctctttaaccaactagctgttgtgtggacaaacagagtgagtacttactcactacaacaaggagggcatccagccattcatgagggatctgcccctatgatccaaataccttccacaaggccctacctccaacactggggctcaaatttcaacatgtgatttggagggcacagacatccaaaccatgtcaggtgccatgagagaataacagattaagtgacaagaaaattaaaaagacagggagattattaaagacctcaaaaacaaactttaaaggcattttaaagaatagataggatttggacacacagaaattttgcacgggtagaaggatggggattgggaagaggtgtttcatatttagaaaacttgttggtcaaagtgtcagagacaggaaagcacaggcccccacagaagagctcagcacacaggagtggggacaagggtgcagacgccaggcaccggatgaggtcccagggcagcacacaaggaggaagagaagcggttctggaaaactctgggcacacataagaggaagaagaatgctaatggacatggaaagggagtggtgaaggatgaaggggaaaaaacctgaggagtgggtgctagaggaagcctgggaggaactttcctagaaagctccaatcaaaagagcacaagtggtataggaggccgggtatggtggctcacgcctgtaatcccagtactttgggagggtgaggcggatggatcacctgaggtcaggagtttgagaccagcctggccaacatggcgaaaccctgtctctactaaaaatacaaaaagtagccaggcgtggtggtgggtgcctgtaatcccagctactcaggaggctgaggcaggagactcacttgaacccaggaggcggaggttgcagtgagccgagatcgtaccactgcacaccagcctgggcgacagagcgagacttcgtctcaaataacaacaaaacaaaataaggggtatgggaatccttggtgacctcagcagctgccatgccatatggaatatcctggatatagacagaagataagagttctagtgtaggtagggaaggtcacagcgagtatatttttttcctccaagaagctatgatagagtgagcagctagagcagcctgtgaaatatttaacagacgccaaggaattgtgtgcttgtttaactgcaaacaacaggctgttgtggttttttttatttgccccaaacaaattgtaattttgaatattttttccccctaaatcaggtctgtcccttccatctacctgaaaagtctgacctgcttcctgtggaaggttgtcctaatgtaaccaccctgtagccctctcattagctcagagaacacaacagtgagaatgaatgagcaaggggaagacaaggtggtgcacagggagctaggagcaagaggagtgagaggagcccaggaaagatgtcccaatggggaggggtgagtcagaaccccagtgagaatgagaactgaggacaggcctcatgtgtctttgccttgtgtgtacacatctctggggtataggttggaagtacaaaacaaaccaataaatggatgtttattgccaggcacaatgataggcaatttgggtgtaagggaaagaaaaggccaaaatcgctgtttatacacgagcctggtacttctttatacctgggaacagtgattaacgtgttcctgtattgtactcatggtccttgtgtgcctaggcaatgaagaggtgagaataatgcagtctggatttggggttgaggctagacaaatagctaaggaagaatgaataggacaaatcagctgtcatgatactgccaccttgaatttagctacctagtttctctgcaagtgagaaccaacatttttgtgcctgattttccagggctagtttgtggctagcaattagttcattgtctagtcttcttcacaagtggcttagattttagataatgagaacagtataagtaatcttttacttctttctacctgcattctgtctttagacttcagtgctcctttgaccaagtcagtatggtgtttgatcttacttagaggactaaaggaatttctgtatctgagttaaggagtactaataagaaagaatatgaaggaattttagagtctgtcccaacattgtctttttctgcctcttcataggaaaaacctgaattctctttattctgttctttgtggctaaaagtgcttctttttaaaacctgtatggcactttactgcttcttaatccaggctagatatagtttctaaagtaagcatgcatgactcagtgttggaacttttccaggtggagcaatgaaaaatgtcctatgtgatcttgtttgggttaataaacaaacccatctcagaaaggaaagagaattcaggtttttctatgaagaggtagaaaaagaatcaaactggtttgtactaaaaaaaaaacagcttaagcagggtcatttgttctgtggaatgaataatggcagtttgctgttctttcagaggtgtgcaaactttgtcattcaaacctgattcttttttggccacctacaatgccaggctctcatgagcacctagaactagggaaaggaaggcagaatgctgctgatggccatcccacaggaggcacatgcatcccttaaaatgagaacacgcttctttggccttcttaatttacctagtttacccaatgcttatttaactattttctcaacttaatccataattaccacccattttcagaaggaaagccagaaagttgtattagtccattctcacactgctataaagaaatacctgaaactgggtaatttataaggaaaagaggtttaattggctcatggttctgcaggctgtacaggaagcatagcagcttctgcttctgaggaggccccaggaaacttacaatcataggggaaggcaaagggggagccagtactttacaaggccggtgcaggaggaagagagaggaaggggaggtgcccctcaccttaaaacaaccacatctcatgataactcactcactcactatcacgagaacagcaccagggggatggtgccaacccattcatgagaatccacccatgtgatccaaccacctcccaccaggccccatctccaacactggggatgacaattcaacatgagatttggtggggacacagagccaaaccatatcaaaagtatatcctagcacttattttctgttttgaaagaacgacaaccatggccagcatatgatggcaaacaaagggttaaagtgaagaccctctctcccaccccataaataatcctctccttcttcctactgagaggagaggtggagagtgaagggggcaggaagtgaatgctcactctattgtataccttgagcacgggactgtcagtttttctctgaggctccagtcctgccagaaggtacagagatgagctgggcttgcagcatcaccagtgcaaggcttgcgggtcctccagcctgacacagaagttcctgggctacatgcaggaacctcctgaagcagatggcacaattccatcctccaaacaccacctcgtgctttttatcacctctcagaatattcacaggaaaccttacttaacacgagctcttgctccaaactgaaaaatgaaaggagaaatacatgcagatctggcatctaactaacgttcccatcaactattctgtaactctgggccagaattagacttttagaatccaagtttgagggatcaggatcctaatcctaccatatttctttttcttactcctgcttccttgttcttttgagaatgaaaatatcaggagatcaagggaaaagtaatgtgagcaaatatgtcatttggattctctaggctgagaatttatcgtctaaatgttgaatgagatataaatctttgccgggcgcagtggctcatgtctgtaatcccagcactttgggaggccgaatcatctgaggtcaggagttcaacaccagcctggccaatatggtggaaccctgtctctactaaaaacacaaaaattagctgggcttggtggcgggtgcctgtaatcccaactactcgggaggctgaggcaggctaatcacttgaacccagtaggcagaggttgcagtgagccaagattatgctactgcactccagcctgggcaatagagtgagactgtgtctccaaagaaagaagaagggagcaacagacaccaaggcctacttgggggtggagggtgggagaaaggtgaggattgaaaaactgtctatcaggtactatgctctttacctggatgatgaaataatctgtacaccaaacccctgtgacatgcagttttcccatgttacaaacctgcacacgtacccctgaaactactagaagtaccacattaatagcgtgcatctccttcttcctgccttgttacttcactttttctgttccatctcttaaagaggcatgtaaggtagaatatcaaagtattgagtgttccctttgcttgcttgctggatatccactggtacacaaacacatcttcgtatctacatggcagacttatgtaagtgacaatactgtttctggtggatggaacatagagcttatatgactgatctgtggtccctatattttgttttgttttattttgttaattttattcattttttgaataggtaatagatgcacatggtacaaaattcccaaggtacaagagtttacggtgaaaagtaagtctccctcctctttgccccagtaaatatagttcccattttgaaaggcaatcactgctctttcattcattccacatttattgagcacctactatgtgccaggttctgttctgggcaatgatatgaagcaaaacagacaaagcccccttgccctcaaggagcttacattttgattacgaatttcttgtaatattcattcaatagcatcttaagttttgtatggccagcgcactgtggtagttaaaagaagggctctagagtgacagcaactgattttgaatcctattttctgtatattctaagtaatcttggagtatttattccaccactctaaactgtgttttattttgaaatggaaataacaattctgttttataagattatgagaattaaataatacatataaaacaccaaacacagtgcctaaaacatagtaaatgctcaataaatattagtgttaattataattgatctgattctactgttctgtaatgctgactagaaataaaggatttattttcccaatagttttcatttcctctctttgctgtatgatcaaagaaaatcactttttaaaggataagcaacagtaaatttaagtcaagtttgatcattaatctcttgtgtattagactatttgctgagttctattaagaaatcaactcctagtaaatcagtagagtatagagacactgtttctctttattctttctaatctttcttaatcccatgtaatttgcagggttgtactatttggtctgtactattaactattaatttaaactttataatgggagattctgtattttacagaagaattaaacacttttgagcaaagtttctaataatacaatttggtatccttgtcttaaggaactttatgactgaagtctccagccagatgggaaaacagctttcagttcatggaaaagtgacagaagttttccttggtgatggtcttaaggtggaaagagattagaagaaaagtacatcgggtgggggaagaaaagaagagaaaataacttctaggataagaaaacacttttaaatattaggccaataactatttcctttattcgacatgaaaaaggatcattagggggcataatgaaagattgtgaggatgttgggttgggtatattacaccatgtactggaccattgacttggaatctaaaaaggaatgagggcacacctatttggcccaccacagtcctgataatcatttaatatactctctttctctcctttgttcctgtttctattttgtattgttttcctggcagacgaagttgacagatctttgaatggttgattatggtgtaggaaatctcttctttcagcctagtcatgatgtagggaggactaggaagaggagattgctgagtagttgaagtaaaatgcctctgaactgcttttattaattggttagtggtgggatcaggtagatttggggagttttgtattctttttaaatattttgtaggctctgataatttattgacagatgtagattaacaataagaacatcagtgctcaagataaaagtttcgaaatgcatcaagtcaatactaagtgaggccttctctaatggcatttgccactgtgctcctgggctttgtgtatgcacatcatttaatgcactacagagctaactctaatttattagtgatacattaggcaaccagagtgtgacctctttggtttacctttggaccttgtcatttctcatttttgttttggttacctattacaaaattacagcctccccgaaactcagtgatttaaggtcttattatctaccttggttctgtgagttaatcggggctcagctgagtcttgggatcttttatgagattgcagtcagcagctgaggtggaggaacatgaccagatgtccaagatggtgtcttcattcaaaggtctgacacctcagctaggatggcagcgacagctgagcgttggctgggcatttctctttctctctctctctctctttgactctctttttgtctctctctttccctggttctaagcagcctctccatatggctaccttgagcttctttataacatggtgctatcatcatagtcagatctcttacattgggactggcttcccccaaaccactgtttcaagagacttgaggagtctgcaaggtttctttgaacacaaactcattcattcaaaatcactttgccaaattttactgttcaaaatttcagccaacccagattcaatttaggggtactatgcaagggcatgaatagaaggaaacatagttcattggaggtaagggtgaggcgggcattttaaagatgagctaccaaaatcctctttgcctaaaaatagtcaaattcctctataacacagctcttatttcactgcaccaaataactttagaaaacataaacctacacagctcctttttagtaagtgaaaatatgtgatcttggtaacatttttaagctaaatatatctgatataaaatgcatgtcatctgttaataaattaccttggttggcttatacacacgtgttagaagctgccactagccaaaatgtgtttggattatatagtggattagagaaagttaacaaatcacacaatacaattcatctcattcctttctaatctttggtacagtagtgtgttgtactatataataatgatagaatgttttgttcattgaaaggagtgtgaatgaactttgttgttgttattgttcattcattcattccatcaacaaattttcctaacacaatgcctggcttataagtaatggagaacagggacattttactgctgtaattggattttgcctttaccagtataaatagtagcaatttaaatgctatttgagttcatgcattcagatatttgggcattggaaaaaattgtgcaacagaataatagtaatcgtgctgattaagcccttactttgtgcattatttcatttaaatctccccaggaggcttgagggtagaggcagacttattacccccagttttatagaggttggaactatgactcagagcagttaaatggtatttcaaaggtcacccagtcaatacatggtacagcttggatttgaacctagagcacctactgtggaaaacagcattaaaagaataccattgcttttatttctaaattccatgtcttttaagaaatgttctcaccattctaaaatgctaagtggataattacttaatgttataaggctattttattttcattaatctttggccaagtgtgttgacaactcccactcctaccccagacttctttttgtttcatagtgaccatttctgaagtctaagaagtacggctaaagaataatggaaacttactttcattgaaattttactgtataccagtcatttaacataatatttgaaaagagtgctaagttgccatgacatgtagatttaaaagataaacataaaaataacttatatttattatcagtcatggattccaagattatttatgagaacttccaatatacctggcccaggaagaatatggctcctaacttaggggatctcaccagccaatgggaaagactaagcagatgtgtttactggcaatacattctgatgagggacacctaatggtgagtagagggtgcgacggcttctagaaagagtcaaagattagagaagttcatcaggaaaaaacgataaagtttccatcaagagaatacaccctagtaaaggctcaaagtctaaagagtttaaggacttctagggactgaaaaaattctgtataacaggagggaaggtgggtgtggaagaatagccaagaaggaaaaatagccaagaagtcagtggaaggaacattgcatcataggccttgctgagaaattggaatgaatgacagtatttgaataacgctttgctcagttctgtagtttcgattcgaaatacagacttaaaaagtcgatgaacattcagacatttctctttaaacaagacttccccttctattctttagagttggaaattattctctgcttgggaatagttttcaatatgttccagacattataaatgacttcccttctatttccatgtatttcccatgttgattacagccaggctgatcagagtaaagcaccaggtgtcatagcatcctaatattatatgaatcatgcatttatccattcatctatgcatgtatccagggaaaacagatttttccccctactttatcggttctacagattcagattcctgtatatttaggtaacattccaaggggatagatgtgctcttataaaagactgcttacttcagcaagacagtttctaaaccctttacttttgagcccaattctccaggtattctcgggggcggtgggggctggagggaagcaaaaaaaaaaaaaaaaaaaaaaaaacagcaattgaaatggcctctccagtgtacccagatggaagatggggaagtcctgctagttttttccttcactgccaacataaacagggtggagcagctgagaaggaaggccactagtggagagagaaagaaacaatgtaacagcaaagtgacagacctcagtcctgcctcctatctggggcaacagaggcctctccagccaaccccagttctccctttgctttgcacttcctccagggacctctcgaaggagcaccagtgagtccctccatattaaatagttgaaagaacttgggccaaaaataaagcagaacacccatttgctttttccaacttgtctcacttctgctcccttcttcaaactcctgataaaaagcagcggcaattagtgtattgcaaagtgcctcttggagagttatgggaatcactgctgctttccttagccccagtttcacaacctcaactcaagggcaggccctccctctctctttttcccctccttccacctgacagggaccataaataactgaggctcccagtgttcccagctgagaacaaagttgaaagtttgcctggagctccatgccactccccgcctgggccactgctttgttttcttctaatgtttttcctctacctgggttggctgtttcttcattcatatttgagaagaatcacctcctaattaaatgtagcacttcgctctctccctacatgaaggctgtcttggttacccgactaggcaacgcgcattggtatcaaattaccgaaagtctacaccggagcagtcctcatatttacatacaaataactcaggggcttgcatttatgtcaccattctgtcctgctagaggcttgccagaggagtttttaatccaatcagaaggagctttaaaaggatgtctgcgaagtggtcaaaaggatcttaacctcaattaagtggggttttttaaaaagatttttttgggggcctgaaattttgaaaatcttcgaactctgagtggggaaagatgtataattcctcaattgcctacgaggatatcaagatgctgagaggaattcagcggtggtgaagagagtggatacaaaccagggattggtttccttgagctgttttggaggttgattctaaatcactgcttaaggaattcctggaaacatcaggaaaacatttgatcatccaagcctagtggaaatggctttaccgcagagtaagatctttgagttgtacttggtgtgtgctgtttttgtttgagatgcagtgaatgtgcaaatagcccagccgtaaatagttacttaaaataatctcttggtactgggtagcagcagtagaaagttgatctgtttagtttttacatttgcaaaaacagtagttgacagtgtatttttagacttgattggtagtttaaaagctgagctcttgcggtttcctgagtttaaatgaatggaaaatgtaaacagtaccgaatgcaggaattggaaaatatatctgggggaatgaatcacttacctttgagaaaacacaacatgtacacttttgcaatctcttggccagtgaagcttgcgtccagaaagagggtaagagtttgcctgtgtggggaaggaacttttctgcagcctgtgctaccttttgagaaggatgggaaatgtcccagagggcaaaagacaattgaaaaacctgccttgtcactcttggaatgtggtttttccatatgatgtcatgttttgcatacgtagctggtaaaagtatttcacataattaactctttgtcttgataattaaagagcaatttatatagtcctttcaaagtgctaaagcacccatattatctctggagaaggctgtgttgctttccatgtagatttcaagcattgggacagttgggctgttgttaatttgataggtttagaagcatttcaaaattgatgtgttccaaggctctccaaccaagcaagttatagttcacataacttgctagtttcttacttaagccccaaactgaaatcctgtgtgtgagaaaaccagttttttttttaaatgtctgtttccttcccacatataatttcaagaacagtaatgaagaggtggttcttattttgtaatccatgtccattcaaacaagctgccctcatcgtgggtgaggtgaggtgaggaaaactataactgacataaaacatccacctttctagtcagctgaggcttacagggaagcaaagggatacgggtaatgttttcagatttgtatttaataccaggagttgtttccgctacttaaattcactcttgaaattgtgtactaacctttacctataccttttccttctaaatgagagtttcaaaaattatccaggtgataggggaaggtgaatatgagatattgggggatttgctgataaccaaaggagtgattttctccacagctgacactttcaaaagggaagcttttgatgtgggcttactctctacatctgcaggtgaagatgcaatgaccggggacacagacaaatatcttgggccacaggaccttaaggaattgggtgatgattccctgcctgcagagggttacatgggctttagtctcggagcgcgttctgccaggtacttcgttgttgctgtctttcatagttaatttaaaacaaccatgatttgtcataaatcaaaatcatgttcatttttcacattatcccaaaatgtgttctttggatgaagatgtgaatttagcgaaatgttctcgacgcaaatacacatgctctgctattttcttttgtggtttgcggttgttaatttcatgtgattgaacatgttaattgtgtgttctttttttttttcccactttgcagtcatgctgccagcacagtagcaaaagagctcactgacaaaactgggagaaccaatctgagtcacatatttcaaaattaagttttgttccatattgaaagaaagtattatttgctaataagtgagaaatatgtgtatagattgttcactattctctgttactgaaataataattcatgattaaaagagagcatttttgaaaaaaaattatgttgtttattaaagttgtccaccaagtgtttgagtatctcttctaaaactgttccattattttgtttacaagggacatgtaagaagtataacagtgatttaccaaaagtcacagacaggaatggtgacaaattcagttcttacaactgaagtggaaaacttctgtatgggaaaaccttgactcaaacttttcttaaactagttgaaagaaacagaaccttgtgcagaatttggagacttctttgccctagtgtggattttaaagctaataattaaaccttctaagccagagccctgaggacattttcctatagtttaaggatctgttgtagaaagtttcattgtctaatagtaaatggcacttcccacaaagtaaaccctggagtttattctcagtgtagttggtgtggccagtatggatattgaattgatttttcttctagtcttttttttagtaggaatttgaaactcatatagcttggtagaacttttgccttataaatacatttataaaaggccttaaagtcttattgtagcaggtgtcattaacaggaagaggaaaaataactttaaaaaaatatgcaatcttttaggcgatcaaagatagcaacaagttaaaatggaaaatatgtagaacttttaaggttcttgagatcctgtagatcttgtttaaattgtagagatttatagcttttgaaatccaataactagcttgccttctgttcttctgataatatatgacacattttgtgatcagtcatttttatgtagaaaactgtagtagctgacctccagtgacataggaaaccagaatatcgcactgtattttttttcttaatataattccaaggctttcacacttctaattttgattgcactattatttgttgctattatatgtaactcattttttttactttgatgactcatgttatgctcagaggcaaatattttttaaaaatctataaagccaatatttttaagcacattgttagagtattatcaagtaaaatatattctgagtgtaacattttaaaaggagtacattaaatgtgtaactcattcaaccataacattttttttcttttttccctgtctgattttttgctttctatttcttgttttttttttttttttttcctaaaattactttaaaatagtcccaagataaggtaagaagacatggcacttttatagtgtttctcttccttctcctggctcatgctctcatttttattttctttagcattgtaatgtgatgtgctgtgatgtgctgcgatgtgctttctttttttctgctcaaaagctttagaaacatcagtaaaaattttctgattttaagaaaagtagaaagtatataataaatattacttacgcaaaatttaccagatacttaaggaatttctttcccttaacaagttttgtatagtgcatgaagtaattaaaggaatttcactgggtttgcagaaaaagtcctgatgtgaagggctgtttgtttgctggtttctgttttatttgagttgtgctaggtaaattagtataaatttagaattctgaggcatgtttttctaacacttcctatatttaacacttagggtgtactgatggctacaaatagttggccttagttgaaaacaatttaatgttttctagatcctcatgcaaataatctttaattttcagctgaaagtacttcgaagtattaaggattccgagtgaaacttgatggatttaattgactccatatgtctaatttaaattggtctggaatgatcagaagtaggaactttagacattatgcaaaatgaagacatctttaggcctttcggttgatagctcccaattcagggctctgttctgcagttggcactcatagagaaattaaaagaaggaggagatgtttaagaagtatcaacaaagtttagatacatttaaaaatgaaattaaaatgaataggtaattattttttaaaacttttaagtgtttgtctacatagaaaactgtttcatacaccccaatgttaacatatcatgccatggggaccataatttgaagaaatgaatgtctaatgcagagagtggccggcgactctcaaatcacaccactggagcaaaatttaacattgttattaatacttagaagctgcactaataatgtagccactagccacctatagttacttaaattaaaattagttaaattcatttgttcgttcacaccagccacatttcaagtgctcagtagccgctgttgttggatagctcagatttagcacatccccttcataggataaagttctgttggacagtgttgagttagagaattcctgctcttaggaagcttctactgtatttgagagaaggtaagagaatagaaacaggaatggcggaaagaagggcttgcaattgaaactggggaaaaaagagagtaatgggtcccatgattgggcacagagggcctgactgtgcaagtggctagagtcatgtggcttactagataagttcctctgtgcaggaattatgcttataatggtcttttagtaagttttgctgaatacattaaataatgactgcagaatgatggttgtttggggataagagaggtccatctgagattctgataaaagtgaaggctccaatcctagaagaatgtacgtacctatctgtgtagacacttagaatgaggcctctaatgtcaggaggctctgtaccttgataaaaggatacccactttctgattttctttagtatagcaggcagtggggaaaagaaattgtttcatgcaaagaatcatttatttacctcttatgtgtatcttctttgttcatttccccatcaagcacacaaaaggcaaggccaaagccaaagtctggctggttcaactggtaaagatacaagaaggcacttttagatccagatggttttttaattatataggcagtgaaagaagaagtgaaaggtgctagcttctcatgatccttgtcccctacacctaaaaggacaccagaacaaaaggggctggatgtctacaatgctagttatgggataccccattgccgaggagccaattctagacttcagctaaatggttttatattctgcagctctattccaaggagagcagaataggaagcctcatacatcattagaaagaggaagtgatgaaagctatctcatgacagcctcccaggtgagatggggaggtgagtagcagatgatctcgtggaagctcctcaccaacctccatcctctcagttcctggaagatcacagggtgttctgtgaagactcagattagcttcaattccggtctttgcctgtatgacttatgtgaatatatgcaaggtcacgagagtgacatggcagaactgttctcccaagggccctgactctattgagttttagtttagaggtcactgtgatgatggcatatcagggcatcagggtacctgcatctgagaagttcaagggccatatggaggatttgacagtggctggaaagaacagttggaggagctagaaagacaacagtagagcaaagaaagaatatttgcagaaaagaccaaataaccatgcagggaatatgaatgtttcctcaaagccaggaagatggcaaaaaggatcatgcaaagtgtattcataacactacttccttcttgatgttttctatgagtagcaacaacaaaccagagttctcagtaagtcccaaagacttataaacagacccatttaaagtagacataattcttatcagtagcgcatgtcaagtagacatagaccagaaagaggagacattctaacataagatctcatcctagaaaaatctgtcaactatctagaatcatctggttcttctcaattgtcatgtcagttcaacttcatagtgaaacatccaaagttttcatgcatttcatattctcaaaattggcctaattttaaacaaattctaatcataaggttgtctacactgaagacattttctcaaatacaagggattttacttttcactatgtcctttcaagaacaacttttgttgatatttttagccatcttgcctgttcttaaagttgcatgcattaatttttttttattcatctcatcatcatctaccactgttgaatggttaactgtaaatacaacagcctccgctccttcagttcggataggtcttacaccttgaacagaagctcctatgcacgggacagcatgatgattgaagaactccttgtgccatccaaagagcaggtatgcattcttttcaaaatagcctttgaccattaaacttacatttgtatgatttaatcaagctctctgtcttgtgacaaaaaatatatttctgcatgtttgattttacatttgtaaatcttctggtactagccagttaaaaaaaaataagttgtactataagcagaaatattcctgtcttctgcaggtgaggaagataggaatatcagagaggaactcagaaagtcctaggagatgtgtagttacctttctcttctctaggtcaaatctatttcagttttttaaaaggagagttaataatcattggtagctgaagttgctggtattaacctcatgaatgtttttgtttgtttttggagacagagtctctgtcacccaggctggagtgcagtggcatgatgtcagctcactgcagcctctgcctcctgggctcaagtgattctcatgcctcagcctcctaagtagctgggaccacaggcgcaccaccacacccagctaatttttgtatttttagtagagacggggtttcaccatgttggccaggctggtctagaactcctgaccttaagtgatacacctgcctcggcctcccaaagtgctgggaacaggtgtgaaccaccgcacccagcctgaatgttgtattttgctaaacaaactgtgtatctatgttggaatttgttagaattgtttttagtaagtaaagatgagactggtcattttttgttcccttagcttcaaagctgcctttgatgggtgtctgaagatgtgatagtattttgctttctaccagaatctctgctacatgcatttggtgtttgtgtaattgttttcttccaataattgtggttgaatagatagcgggttactataagaagttccagtaacacagtcttcctgcatgtgggctcaggatggtcctggaataattactacacagataatacctggctttaagtatgcacagtagtgatttaatgacagatgaaactatctggacaataaaacttttaaaggtggcttataatatttaaacaatgtaaataattggtgaaatcatgctgggctttttgacttactgcacaatgaacgtgaattggagcagatgaataaatgatagtcacatatcatagccaagttagaagttaagcaataggtagacttttgggactcccacatgtctgcagatgctgatgtctagacctacatatgtgtgttgtacttcataggaacctacaatatatattttattactttttactctctagaacattcttaataagcaggccttacagaggtgaatacagtggttattcagtgtttggtcagacaaaaaaactctattaaaaatgattataggctgggcatggtgggtcacacctgtaatcccagcactttggaaggccaagacaggcagatcacttaaggtcaggagttcatgaccagcctgccaacgtggtgaaaccccgtctctactaaaaatacaaaaattagccaggtgtcgtggtgggcatctgtaatctcagctactcgggaggctgaggcaggagaattgcttgaacctgggaggcagagtttgcagtgagccaagattgcaccactgtactccagcctgggcaacagagcgagactctgtcaaaaaaaaaaaaaattgattataggtgcatgtattagtctgttctcacactgctaataaagacatactagagactgggtaatttataaagaaaagaggtttaattgactcacagttccacatggctggggaggcctcacaattattgtggaagagaaagagacatcttacatggtggcaggcaagaagagaatttgtgcagggtaactcccccttataaaaccatcagatcttgtgagacttattcagtatcacgagaacagcacgggaaatacctgcccctatgattcaattacctcccaccaggtccctcccacaacaggtgagaattgtgggagctacaattcaagatgagatttggatggggacacagccaaaccatttcagtgcaatagcatgtcatgggttttaaatgggtattagcactagagaaagcacttgtctcaaataatgaaactaagtcttgggtataaggtgttgccaggaattggttgaaattttctgcttggttggctgtggtcattatttcagtctgtaatcctgctcttttcatattcccaattgaaatgagatggcagtggagatattgataccacttgtaagtataaaaatgcctgttattctctacactctaaggagaccccacaaaacgtaaaatcacaggtgaaaggagactccccaggtatcaatgacactttgctaatgtagaaagcatgtgccagggaatttctgatcaaacctaattgtggcttatatttctgcatattaacttgctatgggtcaagggcccgaaattggaaccaccaccaccatcaccatgaccttaccatcatcactgtcacctccaccactgctaccaccaccactattaccaccatagttactctaccacccaccttctgcacatcaacattgaagtaaaatgcaagtgtttgtggtgctataaaatggcttctgagggttctcacaccattgcctattaaccattaccaagacctacttactcaggtagactgtgggggcagcatttactcagaactaaggatttgtgaacagaaatagaagacaaagagaagttttgagatgaaactgatgctcttgtagtcagttgttgcttccaactcaaaaatacctctgtggacatcatgaacacttctatagacccatcagaggaaaggagagcataggacatctgaaaatctttcaaaataaactttaagttgataatgtagaaacagaaagttgctgtctttaatgagcacagaatacccacataggcattccttgtggaaccagcatgtttaataagcatataacactactcagatccatgcaaatccagaataaattggcaggagatttcagagcgggaaatgagagtcataaagacattttagggactgttgggggcatttgaaaatgtcttggagatatctgtgtatgtaggaaatcattgatcattttcttagcagtgataattttagcattgataattttcttagcttatcactgctacttattggacctactcagagaatattggggtatgcatgctgaagttttccagaattaagcaatcattaattcaactatttatttccaaatagttcagccaaaatgcatgtggataaagttaaagcaaatatagcaatgttaattgttgaatccaggtggaaggtacatgggtattttttatacagtttttcaactttttcatttgtgtgaacaatttcaaaatagtaacttggaggaaggaggaaaaatcctgaaagaggtgcattaactttttaagtctctagttttgagactaaaaaaagctaatgcatctctgtctattattatagataaataaaattatagatacagaggagaaggaaaaggctaattgctcaaagaagaagctggcagacagaagtgtctagatacactgtgcaagactcatgggaagcatttacttcagaagtgcatttaaacactttaggattaaatgacaaaattattagtttctgtttttcatttctctaattttgtatttataatgttcaaaatatagctcttccacagtaataattttgttggaaagcgtgaaagaagttttcagtatttagaattcccaaagcaatgacatataacttactgtcagatttaaaactgcactgtcattgcccagttaaatttgccctgacaagtaaaggtgaaaaatgagtaaaaatgaactctcatacacttctctttttcaatgagtagatctcactcatacaaagtacagttgcctctttattatcctgctgattaatcagtttgcatattaaccacagttaaagtgtagttgagacccagggtgattagtgcaggactgccacctcaccctctagggacctgtgctggctgaaggcacatgtggaggccagagctgggggaggggagtgggagaggtggagccatctccaccccctgttgagcctgagtacttagtcctaatccacttaattccctcctggacaatcaacagtagactgttttgttacaggttatcatgaacttcctattcttttaccttccctttacttcagaagtgcatttaaacattttctattagaattaagtgacacaaaatcattagtttttgtctttcattcctctaactctgtatttataaatttcaaaatgtagcctttccacagcaataatttcatcagaaaacatgaaagaattctgttagccaaaaattacctgaagatatgtttttgaaaatgtatatgtaaatgaaatcatgtcttggatttgtcaaaagatctttttatttaaagcaatggctcaatccagaccacttacgagcatcacttggagaactttggggtgtgtgtttgtgtgtgtgtgtgtgtgtgacagagtctcactctatcactcaggctggagtgcagtgtcgtgatctcagctcactgcaacctccacctcctgggttcaagtgattcttgtgcctcagcctccctagtagctggaattacaggcatgtgccaccatgcccagctaatttttgtattttttagtagagacggaattttgccatgttgcccaggcttgtctcgaactcctgacctcaagtgatccgcccagcttgtccttccaaagtgctgggattataggtgtgagccaccatgcccggccacctggagaacttttaaaaagacgattgctcagttcctgatttctttggcctgtgtagagactgggcatgcaattctaaatgaacccaaggttgaaagccactgattcatagtcagtattcttaactgggggtgcccaatggaattacctgtggctcttttaaaagcaagatgcctgcagaatcagaatttccatgtctgggttcttgggcatatgtatttttaagggttcccctgacaattctaaggtgtacctttagttagtaactgccgatttaaggcaactctcactggaagcttggtgtgtattggtatgtcaacatctaatgtatttgttttataagctcagatttgtatgtgtcagattgtctgagagcaacacctgtgcttggaaacattccattcctctccaaataggatttaataaataaagggatgagtctaaactgaagcctgattgtctgggatgaatgtaatagcatggtgctttcatttcttctgatgtaattattgaaagcaactgtctggtacagctaatgtacttaagacacattactgtgtgtgatccagattagacagtgctcattacataaatggaatgctattcactagataccttcagtgtcaggagatataatggtggtaacacttatggtggtggtgaaaacagctaattttgagctcctattatatgcctggaactattctaagtgatttagcagtattaagttgtttatagttcacaatatccctatgaaataatttgttaaccccattaaaaagatgaagagtccaggcacggtggctcacacctgtaatcccagcactttgggaggccaaggtgggtggatcatttgaggtcagaagttcgagaccagcctggccaacatggtgaaaccctgtctctactaaaaatacaaaaattagccgagtggtagtggtgcacgcctgtaatcccagctactcgggaggctgaggcaggagaatctcttgagcctgggaggcagaggttgcggtgagctgagattgcgccactgcactccagtctgggcaagatagtgagaccctatctcaaaaaaaaaaaaagaaaaaaaatgaagaaactgaggcacagagagcatgagtaactcacccccggggacacagcttgtaagtggcagagtcactggccatctggctccagattgcctcattttatcctgaacactctacatctgcattgctcagtgcaagaaaaaggcccttgaggagtccacgtaatttatagtctctcctccaggattttatacttgctagtattcttggttgggccacagaaccaccatcgtgatgtattttttagcatgaaagattatatttagacagtgttctttgttaacgtttatttctaatcctaataaagtcttttatttattcaatgtgctttaaaaagaactgacatattcagtaacaattataaaaagtatgaagaactggccgggcgcggtggctcacatctgtaattccagcactttgggaggccaaggtgggcagatcacgaggtaaggagatcgagaccatcctggctaacacggtgaaaccccgtctgtactaaaactacaaaaaattagccgggcatggtggcacgttcctgtaatcccagctacttgggaggctgaagcaggaaaatcgcttgaaccagtaggtggaggttgcagtgagccgagatcgcaccactgcactccagcctgggagacagagcgagactctgtctccaaaaaaaaaaaaaaagtatgaaaaactaaaaattatggcatggaaggcatcattacaggaatggaactatttgaccttcagacagataaaaggtagaaggcatgacatcagtttacaaatatttagcaggctaaccaattagtttatcttcctttaaatgacaccagaattagttgtaagactaaaaggtatgtatatactgtaggcagaaacatgtaattcagtatgattttttatagagtcattcaaagatgggagaaaagcataagtcacttatcgatgtcggttggttttgcctgcatacacccatttggctttccacatatacccatttccgtggcagtgcctggatctgatggtcgaatccctaaccccacccatttctcagctaatgttgtttagaaggggcataagtccctcctgttctgcaacagtgagacccaattctggccgttcagagcattcctatctcctggattacagcaattactttaggataaaaagtgaaatctgagcccatctagtgagactcaaatttgagactttgtctaaccttttgggaaagagaaactctactggggttcctaagctataaagatgacatacgtccaaagctgctgggagtagaatgtgaagaccaatgattcctaccatcatttgagctggattcaaccgaccttgaagttagcaccatacagattttcttgccatataaaccagcaatttaatttcagtcttcccccatccctggaaagggagtatcttaaaccagttcagtttggttttctgtcattactaatgtggttgctattggtggtaatgaaacctggtaggaacaaccacatatcaatgggaacataaaacgtctagcatcttaaagtgccattcaaccttgagattctattattttatgctttctctctagaaataagtaaatccaatattaacaaaagagaaaatgaggaactatgatttaagagaatgctataaagttggggatttcttttttcttttctttttttttttttgagacggagtctcactctgtcacccaggctggagtgcagtggcatgacctcagctcactgcaacctctacctcccggattcaagcagttttcatgcctcagcctccccagtagctaggattacaaccatgcaccaccacacctcgctaatttttttgtatttttagtagagatggagtttcaccatactggccaggttggtctcaaactcctggcctcatgtgatccacccgcctctgcctcccaaagtgctgagattacaggcgtgagccaccacacctggataaacttgggtatttctaaacaaaaactttagaaaggagccccttgccaattgatcactctaaaatgaacaccttccatttccttgtagttctgttgacttaggggcagtgcatctgtgaaaagagaggaatgggacagctgtttggccctgttctctctctgagtagatttctttcttttgaagacttccttttcagaccagatttgcctacatggtttgttcctgaggggactagtggcaggccttcaatagtgactggtttagaagacttaactagactatgatgtcaacagttgcactggctgtttgaatgctgactgtggagaaaattctgtaagtgatattggaggcctcattatagccatcatgtacaggaaggctgctgtcacatcttccaccccataactcttctcatttatttcacagccaaggattctggttcctttggattggacttggtcttttttgaggctaaggatgatttcatatacatttagtcatataatgtgtaatgtacaatttgatatgttagcaagtagtgtgaaaattggagcattcttcagaagaaacttcctgctcgtattttcaagatccaagcattttcaattacctcagtaataggaagggagaagaatacctaacccaaaagactgcctatgctaacagtcagattttcctcctctacctctcaaccctattccacccacactcccacccccatctcccacacccgtcggcagattaaccttgctatttctttcacataagctaatttctaaggggggtgctcagaaacgtgcatggtggcagaaggtagccagcctcagattaaagatttgctagagatagtccccctagaagataggcatctttgactggtgacatttaatatgctgctttctctcttcaatgtgctttgccagcattattcaggtgatgcattcaacacctctcaacaattggtcagcaagattacagattttttgttttaaggcagagaagttggtattgtgacttccttaaggtagtgcagttagttttgatgtctcaagctgggtgttgacacgctcagcttccactctgaccttgattcaccttcttttgttcgagttcataaccagattgtcttgaaatcaatccaattcggaaatttaatgaacgaaatttctttatatgctattctcaaaataagtcttaagagtaataatagttgacttcaagaaaataaataccgtaagggaaaaaagacctgctttttctattatagtaggcctttaatttttattttattttactacttgtgtcaggtttccttttatggaatccatttcttaaaagtgtttccatgtagtagtgctggatgtttaaacctactactatctatttgggtcgcggtttgccatttcactcaatatccactgcacgtcacaataattataatacttaatacactacctgccacaatattttattaaatgcatcatctcatttcgtgcttttggctacctaatggaaggggtattatgattaccactttacagacgaggagactagggctgtgaggagtgtttagcttgtccagttaaatagcttgtccacagctattaggcggtagagctgagaatggactgtaaacctgatgggtgcttaaacccattctcctgctggccactaggcaatagtgccactctaataagcaaagcatagcagatctgagtaaagcatgttagccatgggaagaatcgatgcgtagacaagtattttgcaaagcaaaaacaccactattatttctgttaatccagcaggcagctctgacttctccctgtgatgtgaaaaggatatgctatcctaaatatctacatagagggatgcaacattatagaaatataagaaataaattatcttcaattattaaaaatctagaggtaggctgggcacagtggctcattcctgtaatcccagcactttgggaggccaaggtgggtagatcagttaagccaggagttcgagacctgcctggccaacatggtgaaaccccatctctactaaaaatacaaaaaaaaataaaataaaatcagctgggcgtggtggcacatgcctgtaatcccagctactggggaggctgaggcaggagaattgcttgaacccaggaggcagaggtttcagtgagccagcacagatagcgccactgcacttgagcctaggcgacagagtgagactctgtctcaaaaaataaaataaataaatatctaggggtatgagattagcatcatctgtgtttttgtttgcatggtaatttagagttttcaagccactttcacattacttgggtcattccattctcacagtgaatcagggcaattaatattttctacctgtcaccctaatgcagaaatggagattcagtgagttttttgacttgccagtcactgggctatggagtgacagagcctgattcaaacccaagtcatcttattcttcgtgtggggaactgacacccacatgacttcctctgccttggccctgtccaagttgtggccgtagagtgaagttatccctgatagccctttactttctgtggctcctagtctgattgtatcatccaactgttactaaactaaattgtatttacaatctcccagaattgttgcactgagtgttgcatgtgacctgttattgggagatttcctggttgctgttaacattagcctgtcaaggctaccagttaatttgcaagaccaccttcacccatagatggtagagctgttagataaggaaacttgcagggttagttctggaccttaactcatgtcatctaacactggaggttgacagtcagcaacgtagagaattactaatattggagttaattggatttctcctttttttctctctctcttgcaaacactttcttgaccctgcctctttccttccctgcctggacaattatttccagacctgggcatttgggtgtgtccttgtttgtaaggccagtgtgtacttgttctcctctttgctctgatgaataggactagtgagaaactatttttggaaagtattaagctcttggagacggtgatatcatcattagtcaggctttggactccattaaataatgtgcattttcagttgaataatccttgacatcacttccaaaatgaaaagtaatgtgcttattcatattatctttgacatgggaataaaaattattaaaaattccgtgtgaatttttctttaacatagtgttctattaaagccacccagtgctaggtgttgacttcgtattgcctagtttttgaagtctttctaaacctcattttcctcatctgtcaaatggctccattactctcagggctaataggttctgacaactcaaacaaaaaatgaatgtatgggcctaggtcagtccttaccattgaactgatgcacagtaagttgtggtagtgctgttaacaaaggaatgtaaatattttgagtcaataataagacctaggcattgataagatgcattcttgaatggcctccattggtttgataaaagcatcctatgtgtattactataatgccccagtgctgggactggaatatttttatttttgctgttttccaccataaatgatcagattgtgacaaatgagctaatataagtgaaagtcttttgaaaagtatagaaggctttacacatataaggagacattatgataattccatgccaacaccagcactgcattggtgccagactttgacgtatatgttttcttttatctccatatcaaccatccccagtttgaaaatgcagaaactaagactgaaaaaagttgagtaatctgctaatgatcacaaaaccagcaggtgatgctggggcatctctgaaggagctttcaataagtaaagataaggaaaggtcaatgacaaaatatctcctttattcctgatggaggccaggcgaggactggcttagtgtctgagccacgtgggcctgctaactgaatccctgagataggcacactcccctacccaatgactgtggtgctggcccaggccaggcacactctttgcagaagtaggctttggagagaagaggagactgctcactctctgtgcccatagattgaaaactggatctgagcagaaccttcctggctacctttcccaaatctatcattcagatacatcactttaatttccagggctaaaatgaatataaaggggtagggagaggcccatagttacacaactgggttgtcttttcaaactggaaaaatcgggagtgggaaagaagtgttttcattaacaagtggcaaaggcaatttccaaatctaagtctgtgactcaacttcaaagccaagcttttccattgagcccaggcaacacccctccttgctgagaaaacttaaaagtcaggtctagttcatctttaaccatcatcatatgtggtatcctgtttatcatttttattttaaaatttttgtgaatacatagtaggcatatatatttatgggtgacatgagatatttttatacaggcatgcagtgcacaatcacatcatggcaaatggggtatctatcacctcaagcatttgtcctttgtgctacaaacaatccaattatgtacttttagttattttacaatgtacaattaaattacttttgactgtagtcactctgttgtactaccaaatactagggtcttatacttttttttttttttttgagaaagggtctggccctctcacctagactggagtgcagtagcactaccttggctcactgcaacctccacctcccagctcaagccatcctccctcctcagccttccaagtagctgggactacaggcacacaccaccacgcttggctcttttttgcaatttttatagagatggaattttgccatgttgcccaggctggtcttaaactcctgagctcaagtcatctgcccactttgacctcccaaagtgctgggattacagacatgtgccatgcaccctgcctttattcattcttcctttttttttttttttttggtgcattttaaccattcccactaccctccaccccctgcactccctcactacccttcccagcctctggtaacaatttttctactttcgatctccatgaactcaattattttaatttttagctttcacaaatcagtgagaacatgagaaatttgtctttctgtgcccagcttattttagctaacataattacctccagttccatccatgttgttgcaaatgacaggctctcattcttttttatggctgaacagtactccgttgcgtgtacatactccattgtgtatgtattttctatttctattcatctgttgatggacacttaggttgcttccaaatcttggctattgtgaatagtgctgcaataaacatgggcgtgcagatgtctctttgatatacttcttttcttttgggtatatacctagcagtgggcttgctggatagcatggtagctctattttcagtttttcgaggaacctccagactgctctctgtggtggttacattcccaccaacagtgtaagagggttcccttttctccaaatcctggttagaatttgttattgcctaacttctggataaaagctattttaactaaggtgagatgatatctcattctggtttggatttaaatttctctgatgatcagtgatgttgaggactttttcacataccggtttgccatttgtatgtcttcttttgagaaatgtctattcagttcttttgcctatttttagttggattattagattttttttttccttagagagttgtttgagctcattatatattccggttattaatcccttgtcagatggagagtttgtcaatacattctcccattctgtgggttgtctcttcactttgctgattgtttcttttgctgtgcggaagcttttcaacttgatgtgatcccagttgtctatttttgccttggttgcctgtgcttgtggggtattactcaagaaatttttgcacagttcaatgtcccggagagtttccctaatgtatttttttttagtagtttcatagtttgaggtcttagatttaagtctttaattcattttgatttgatttttgtatatggcgagagataggggcctagtttcattcttttgcatatggctatctgattttcccagcatcatttattgaagagactattattcctccaatgtacgttcttagcacctttgtcaaaaatcagttcactgtagatgtatggatttatctctgggttctatattgtgttccactgatctatgtgcctgattttttcccagcaccatgccgttttggtgattatatctctgtagtataatttaaagtcagataatgtgattcttccagttttgttctttttacttaggatagctttggctgttctgagtcttttgtagttccacatacattttaggatttttttttaaatttctgtgaagaatatcattattttgatagagattgcattgaatcctttgattactttgggcagtatggacatactgttaaatatttaacaatatttaacactattgattcccccaatccatgaacatggaatctctgttaatcattttatttctttttatttatttattatttttttgagatgaagtcttgctctttcgcccaggatagagtgcaacggcacgatctcggctcactgcgacttctgtaccccgggttcaagcgattctcctgtctcagcctcccgattagatgggattacaggtgcatgccaccacacccgtctagttttctttttgaatttttaatagatatggggtttcaccatattggccaggctgatcttgaactcctgacctgaagtgatccacccacctcagcctcccaaagtgttgggattataggcatgagccaccaccgcacctggccctgttaatcattttaaatgtgtatttgttcagtaattaaatagaggcaaagtttttttgttagtactgtggtgctatgcacagtaacatgtcagaacaaacataagtgaatagttgaaattttatatttcggttttaagtagattctaatctgtaggagtaagtcttcgcagacaggtagcatggaaatgaaataccaattcagtatctatgtataaaaccgtaggttccattgaattgcttcattttatatttagatggatgcgccataggaagagtattttgtttccctgtatttaggttattaaaattgagttacgtctgctcataaacctgaggaaaccacaaaactcagaagagaaagcactaaggtacctaaaaacatgtttaagtgttactatctgggacaaatattgggacatatagctcaaaataatatatagctcattgttttgatcaagtatgagatttgttcgtgttacaacaaagcttcaatgagtggcagagttgcaagactaaagaagttaagaaaggactcagagggatgtggaatccatgtcctggcacactctggctttgataaatattacatgattgcagtgatacctttttgtgagacataattcattgtttcaataattaatggcaccagtgcatgtttctaagagtaccaaaggtaaataatttactgtaattaccaaagaggaatgatattatttatttatgagaactttttttaaaaaaatgaacctttgtgaaaaataaccttaggctccccagtgtaggaactgtagcttgccctccactccactcatgccaaaaaaattaaaggaacatcactactttgtattaagtgttttgccctactctgaaggtttgttggtttgggtctccaaaagtcagtataagttgttgttaaatgaggccagactgaaaccaacacctcatatttggttaatccatatagaatttgggaactttcctaaatggtttattgcttttgacgggttagaatcttggttccgtagattcttattagaagcttaattgcacacccattcactagatgtgtcctcgctcattaaatgcagataaagctgttcctcattcatgtttgcattttcctaggatgtgggtgagatagtgacttgcatgtaattgctctacaaatttatttttcaatttgacttcagggctattttttaaaaatctgtgtaattcagagtaagtttttaaatttagattttattattaccaaagttatgcaattaaataaaaagccacatcattctacaagacacacttgttaggaaaaaacataatccccatatacaccttcagtccccaagttctgctttccagagacgagtgcttggaataatttttgataactcgtatgatgtgcttggatatctctaaatactgcatgtatattgttcttgttgatttttctccatttcaggaattatttattgacttccccaaatgaaagatgaagcttttttttccacacttttcctccctatgcacacttcgtatcctcccatttccgcaaacagttgtaatttattttgcttatatctgtatttgatgcttatcttgttatgcctgtgtaaatgttactcacatatgtggcttatattatgattgctttttctttcttttttttgagacggagtcttgctctgtcacccaggctggagtgcagtggcgcaatctcggctcactgcaacctccgcctcccgggttcaggcgattctcctgcctcagcctcccaactgggattacaggtacgtgccaccacgcccagctaattttttgtatttttagtagagaaggggtttcaccatgttggccaggctggtctcaaactcctgacctcaagtgatctacctgcctcagcctcccaaagtgctgggattagtcatgagccaccgtgcctgacctgattgctttttctttccagcacaatattttattttccctggagttttttcacttgcttgatgtcctctgtgcatatcaatagtccaaccccaaaactctcccccagttgtacaaatctctcaatgtgttcacattcattaggtgatctatgtgtctcgtctacttacctcatctcgcttagagctttcttacttgtcatattccttgtaggtccactgcacacagatgtgctcttgggtcttccttcatcataaccatgaaaattccctttgttttctcttgtgttggagtccatgccctcccttttcttgggtcagtccttcactttggtggagtacatcttccattagtttcctcagagagtgcatgagaaatatgttttttaaggtgttatatatctgaaaatatctgtctagtttatacttgtttttaatttagctggttatagaattctgacttgaagtcatttcctgtcagcatgttaaaggaattgctctattgccttttaccttcacgttttgctgttaaaagtctgacacagaccctccatctgtgaccattttttctctccatgtttatagaccctgtctttgtctccgaattctgaaatgttacgatgatgtaccataatgggttctgtattcatagtgttggtcactcactgggtcattttacgctggcaacctctgtctttggctctggaaaagtttcttaaattgtttccttgatttattttcctttgttcacaattttttttctttctaggacttctttttttttagactgaggggaggatttgaacctcctgaacttatcttttgctttcttgtattttctctcctattttctagagttaaaaatttctctatactttctaaggtttttttcaatatatttgttacttctaagagttatttttccctaaatgtttcttttttttttaataagtagtctattgtttcataggtgtaaaaatatctcatctctctctagatattaatgaataattttaagttttcttctccctgaaaagcctgtttcctgcaatttgctttccttctgtttgcttgtttgttttgtttttatactggatgcttttttcagcagtctagtgacggtcagctgtctactcattaataagctcattggaagctctctgtatggtgtagaggttgttatccatgatttccactgaagtaataagccagaacatttcactgggaaattccaatgggcaggtcagaatcctcagagacttcccattttttgcctagaactctgtccccagctgtgtctgggagaccagtaaaggaagggtgcgattctgaatattcagtgtacaatccccattttcaatatggtgcctctagccttctagtctcctgcctgtagtcttctgctagggttggtggtagtgatggcaggggatcattatttgacaactgaggggattatgaaggtcaaatcactttttaaagagaattctagccaatccttctgtttttctgctgatgtgttttctcttattctctctgtcctttctgtgtctgtatttttaactatgtgactgtcatttcactgaggtttcagtaggcagcagattgtgggggatctgtgggctaataccttttatcacattggcacattcatagccattatcttttcaaatacagcttctactttattctcttcttctcttctatttctaagggtccaatttacacctatgttaaaatctctcaatgttccacatcttgtactgttttctttcttttttttaacctatccttcattttgtatatttttccatttagggctctaacttaaccctcttttatattgtgtctaagtaaagaactgacattgtatttagcactgaaccaatgcccatttgattccttcttatgtatattctagcattctatcccatttaatttattttctctatctttccctgtgtttttgtaaacatactaatcatagttattataaagcacttattagcttacctcagaatcgggatggcctgggagtctatttatagtgtctctctagcttggtttggttttatttcatttttctggttttatccacacactctgaccatgcttggcaatttttcactttatgctagacatggtgtataaaaaattgtggacacacccgatggtgatatattccttcacagaatgtttgccctccctctgctaggcaaatagaatagtaaattttaattcaattaagattttgctgaaatgaggctggtctgcagccctggtgaaagctcacactacctctggtttccccccagcacaccagcatccttatttaaaatcgttgtatgatcttcaaatctcttcccattataagttctaaacttttaagtcattttctcattactgccaaaaatctccattatgctcttcagagatatttctggttaggttttgagcttcctgttctgcacagcttcggaattcagcaaatgttcttagcaggaaactgtagcatgcttgaggccacccaaatctccaccaaaactctcctggcttttctgttcaacaacagtgacccctgtaggttaaaagtacaaatctgtttgcactggtaactgacaaaagcctgtaagttaaaaatgggcaacagaaagtcaactcaactcctgaagatgttcaccctcccagagtttggtagttcttttagttctcgatgcttcaaccgccctctgctgcattcagatacaattgctgtattttatctggcttacttggaagaagcactaggctgctactagctactccgccccacttggaaccagaagtcatcaagattgaatttttcattttttattttgagaattgggaaaaaaaattacagttgttataggattaatttgaagacatgttgaaaatgtgacatgtgcttaaaatcatagttggagttagttatgtgatatttctttgccatgtcagttacccagggagctttcttaaaagattgaaataaaacaatacatcaatagactttgttttctaacattacactcagatttcaatgtatttctatagaggagaatttaaaaattatttatgttgaatgtaagtctatctggaattagaggaatacaaatatattttatatgtgtagagaaatcagtcttgtatggtttgttgatgtaatttaatttaccattttatttttcagcatctaacattcacaagggaatttgattcagattctcttagacattacagctgggctgcagacaccttagacaatgtcaatcttgtttcaagccccattcattctgggtaagtaacctaaatgtcacttttcattatcctactacatgaacagtgcatttattacttagagttataaattcacatcaacaagcttcatatatatgaatacattcatgtatgaaatgtatattcattagtatatgtgagatgtatttgtaaatcattgtttttttctaagtaattctgtatgagttttttttttgagaaaaatttaattttgttagaaaaataatgaaattactagtacaacaaactttcctggctgttctaatcttctaggtctttaattttccttttcagaaaatttcctttttaagttttttaaaatttgaaacataatgatttttctccgttttacttttctattcaaatgaagtttttctaggtatctgatttttctttccaatagaaaattaaatatgtaagtatgcctgttaatttaccttaactgacttttgtgcttcccttaataatagaagaatttctctcaaatatttagtagttgtttttgttttttgtttttgactgggtctggctctgtcagccaggctggagtgcagtggtgcagtcttagcttactgaaacctctacctcctgggcccaagccattctcccacctcagtttcttgagcacctgggaccacaggtgtgcaccaccatgctcggataatttttgtattttttcatagagatgaagtctcgccatgttgcctaggctgttctcaaactcctgagcttaagcaatctgcccgcctttgcctcccaaactgctgggattacaggcatgagccgccacacctagcaaatatttagtttttaaatgagcagtaagctctggtattgtcatttttttctcatatgatacaggtctttgatttgataaatgatttgtgtgattttccttttaaaagaatatataaatttgaactttcgagttggtgcctctgcatttctgaagtaaaattacaattaagttgtattaaattgtaattttaaaaaatgaataaaaagaataaagatatttacttaaaaaaaaaacataccagtgtctacactggaagtgctgtggttaaaaaccacaccgagtagcctcctcatcctgcctccctggtcaatggaattcgaggcaggaggctaaaaggggacctgcttcaattactgaattaataaattagtgtatctttagatactggattcttcatctttgggtaattcaaatttgggataattgacatccatataagtagaatcaaaataattcattaaaatgatgaatatctcaaggtgtttttgcctttgaaattggcatttaggccataagttaattgtgatcaaggacaagggcagattattttggaattaaataaattaacaacaattaacttttgtgaagtgcttcatatattatatgaagtatttgctgctgctcctaattaaaataaattgtaatagctaacgtttacttacttcttgtcgtgtacctggcattgtgctaaatcttttacatgtattgtctcatttatatttacttgaaccttataatgatactgtgagatacgtattactcattatcctcattttacaaataaaaaatcagactcagaggaatgcttcaggttaaaataccgttatagattttggctttgtaatactacaattctgagaaacagaacaatatcgttcaaatgggaataattgacatgaaagtgtttcataaattataaactttatggtggcttttgagttagtaacattgcatttctttaactcaattagagaaaccttgaattattataattttaaactgctaaaaatatttatataatttatattcaatgcatatgggtctaatattggaaaagcaaaagaaaaaatcagattcaagaaggaaactatataacatctgggatacattcagggagcaaagatgttgaagagttttttgaatcacgcttgatgaattgccgccatatttcaaagacctgaaaccatcactttgtattctctacaaatcaaagacaaggtactagggcttaatttagtaaactgagaagttgaagaaacatgataacaaaatcagaaatgaactttcccatacattaaaaacaatgaagtatttgagtatgcaagttatctccccttcaccttgaatgttattgaagacaagagagacaatagacatgtgcaggaaagcaaaagtaatggcagcaggtgtgggcttatttgaaaaggaaaatatagacctggtgtgcacttagaaatatttcactgatgccaggtccttgcagtttatgcagctacataaggcagatatttttctaggttgtcccacaaatgccagatgccctggtttcattttctgatggtttttatttttcctttgcttgtcattgacattttctgttgcttgcttctaattatattacattaattcttcccatttgctttctaaattattttgcagctattcttctccacttcctcagtatgattcaaggtgataactgtgtcctttatgtgaaccatcctttttgtatttttaatttatgtgaatttttgccatagttagatcgtgtcaatgtctgtagtatatcagcatttgtcatcctgctgttcctaaaactagaaacattcatgtattagttttaggatcatttgtagaatttgtgctatagtttaaatattaatgatacaaatattattatatatcacctttttaatttgttctataagttatgttgcatgactttttcacacaatatgtaagacatgagtttgtaaaacaaatcactatattttataatgttattaaataataggacccatgtcctgtttaatgaatagtcccacttttcctcagtctgttgactctatgaagttgagaacctcagaacaataaatggttgctggtgagcaccagccatgtactgtgtgctatacagaacacagagaaagagactcttccagtttgttgttaatatcatgttaactagtgttttttccattggttctgatattctttacagctgagatatttttattttaatctgataaactgtacgctaccttcagtccactcagctccaatcagctatctacctatctatccacccatcaatccattagtattagtaaccgagtctcacctacacagtttctaagcaaaatagttttattcattggttcattcagtaagcatttatcacgtccctattttgtgctagaattgtgcttggctctgcaggtcaatcagtgaacaagacagacccaatcagaattactctctatattgttgagactcagcggttgccagggcaaacattcccctctcagtggaaacattccagtgtgtgtgtatgtgtgtatgtgtgtactgacacaactgaatcttcaagcccagagtttgtcgtgaatcgttttaaatccattctgttactattattcctaatgaaaaattgatttttgtagttacaactacgaagtgcagggaatgatttgatttttgtcttataatattgccatattgccttcattattgaataaaagtagttgttaaatatacgtatgtctaagaaaatgtaggcagcccagagcaatttcaggtgagcctcatgtcttttagcattggtaacaattcatcccgacacttgtacaagtgaacaagtatctttttctttgactagggaggagtgatttttgttttctttttgtttttgagagagtcagtgttttccccttttaccttgattatcgtagtggtcccaatctcccaaaatcgatagaatgttgtaagagacataaattcattcagagtaaaatggttaaatccaaaatgagcaaaagggtatgaagacgagtccaccttactgatgagcagagttggttctaggaatctgataggctgaaaaatgatcgccagcccattgcctctgcctgtggggatcacaggccagtttgcttgaaaaggtcactctttcaaggtcaagaggtagcattcttcagaagacggtccccagctaggaagtccatgcaaggtcttaaaatctgtttgcaggatgttagcattgtttttaggggaaaaagtagtaaagatttttgatggatgggactttttttttctaaaaacactttaagaattccgacaattttctaattatcaccattttgtactgtgctagtagtaatctgtgtattttcatacgtggaaactagaatacagggatatatttgtgttcccctgtctgaccttaactcttccacacattgaactcattgatttatgtttacttataactctgtgataacgataactgtgttataactctgtgatgatgatagtgggaccatgcatatgtgatagaagacagtgattccaatatgcttctacccaaaaataacagttaatttctttatagttctatacctattaatacatgcagacagttttttccttattagctttaataaaaggccaatgacagaattatgttatttagagccattttctaaaagtctaagttccacttttttaatcattgtataaaatattcaaatgtaggttatttcagacagcttttaagcccatatttatactgaaaacatttaatctctttccatcaaaatcaccgtagcaaatctagtcatctcctgcttttattcttatattctgcttcatcatagtaaaaattagtgttggtatgattaaaaatacatttattttatgagtcgtaaatatcaagacatactgtggagtttcatcttacttgtaagagaccatatggcagcatatggcaaaaaccacttatagttaaaatgacctttgaatataaagaccacagtttttttgttttaaatgcatgagaatcctgttactagaccgattttactccagttttgaaaccttccttattccttccatttgagcctggtaaagtagttggcttttctatgggggccatgttccaccaaaaacaagttgtgtttcagtttttgcaaagtgcacaagttaaatgcatgtttgatgtgactccactgtattgacttctgatttatctttagaggaaatgatagctacattgtctgtcgctttaaataaacttaaacatttaatttccaaacttgctgtgagcacagtttatttccgtccttgaattggcctctgatcttctcccctcaggtttctggttagctttatggtggacgcgagagggggctccatgagaggaagccgtcatcacgggatgagaatcatcattcctccacgcaagtgtacggcccccactcgaatcacctgccgtttggtaaagagacataaactggccaacccaccccccatggtggaaggagagggattagccagtaggctggtagaaatgggtcctgcaggggcacaatttttagggtaagttgttttgtcaattttaaccttggccctcacaatgcatctttgattttctttacccttgttaactcaaggagataactcttaaaactgcttagttgtacctgattgagtatactttttgtaaagtgtcaaaggtcacaaagctgtgtgattctgtgaaaggctaataggctgatactttcttaactcagtttgctagtcaaggcttttactaaccgagaagcatgttctctgctcagcaagtgcacggaaccccagtggtccctgtagaagtcaaggcaccattctagggaaaaaatacagatgctggaattattttaccgcattgaatatatggctactttggggacatgtctttttaaagaaaattttttgggaaacagttcattgtgatatggtattttacaaaaaggaaaaatgaatttaattcattttctgaggtggcacttgggtacaaatcaggcaggctctgtcgtgactgacagtttgttcacaatttccccttctcgtttctctttctgctgcatggatgttattcagtaaactgcatcttcctaccaatcctccccctgtaaatgagggtgagagcttggttagccgaatcctgcagcttgggcctcaaggaacaaaatttattgggtaggacctttatagacaagatacagaatgtctacaatttttttttttccattttcaatttttttctgtcacacccatggtctgattcttgtcttaagtttatttttattttttaagttttttttaatgctttcagttgatgtgtgtcactgaaagaaaaaaaaatcatagtggcttgacttaatgtagcaccgctacctatcttgtgcttttcaggcatgtggaattcactgcaagcattctgctttcataacttcgtgcttttgtaaacctttcttttatttgaaatgtttcttctgaatatgatactttttaagacagcaaaagtctttaacccagtgtaagagaaggtatttgcaggctttgagtcaacatttgctatcaattacatgtatgtacacctgtgtgtgtgtgtgcgcgtgcgcatgtgtgtgtgtgtgtaattagatcttttaaaagtacatgagtactgtgtaattttttatgggctttgagaagaagtcatcaataagtaaactgattttgaaaagtgttgggaaaataagatatttaaataaaattaaataggcagcagatagagtattcttttaaagttataaaattgtttcgtttggttttgtttgagctgaaatgcattggtatttgttgtttgttcacttgtctgtttgattgttgtatttgccttggcagtctgcatgaagaaacctgttaatgaaaagctatgcttggctttcaccttgatcaaagacccttgttcataccttctctccaatatcattgaacatcatacataaagccacattccttaaatatttacagagacagtatctgacatattaacctgcaaagattgtatcttgttctcaaaaataaatacaatttaatgtttaattataaggtgtagttaaaaactctggtaaatatcttaatcttgaaattattaatactgctaagaacacttgattttgtttctacctattgaagaataaaggcattataaaaattattttttaatctttaatttgaatgaattatgattttgctaaaagcaaaatgaccatatttatcatccccgtttgaagcaaatgcttttctaataaatcgatattcatgtttttatttatattatttgatcattacaactactatccctttttctgctcttacttacttaagcctgtatcttctgttatcacatatacctaaacacataggttaagaaatggggttccatacaacctctgtaggagaataatgatactgtctacttaaatgtcataaaataaagctgcacaatccaactacataaactgtgtgtgattgtggtctgcttacttccattcatctcttttagtatttatcctattttaaaatttaacaaaattatttcccgtggcttgattggctatgttcaatttgcagccattcttttacattcctttgcaaaaggacactgtcaaaaattactgtgtcattatgtgacaatttcaaaccaacaagtacttttacagaaagtgtaagtattcctatgcaggttatattagagccaggaatggaagctacctactaccatttcacaaattgaaaaacacaggaattgtcttaactgtacaggccatgaaaagcatggaatctgcctgttggaggagtcgttaacatattgattgttttcttgctaaggagaaaatatagcaatcatctttcaaactaggaactttatagaatttttttttaaagaaatgactgtgtccttttaaatcattagcatttgtataatatacctattgtgtcttttaaaaatggaccaactttcttatggtctactttaataagtttccattctgattcaaaattcctatttatatgtactgaaaaatttcccccattaaatcctatgcctaacatatggtagtcctccaagaactgtttgtgaatgaatgaatgatggcatgttttcaggcttcgaaaatattctttaattagcaaatgattctgcagctttgaaatcattcccaaccttagtggcacctctgattttcaaatgaatactgttaacgaaacattttttaagtatgatactataaatatatttaatttgataccaaaataatgtggattttttttccagccctgtcatagtggaaatccctcactttgggtccatgagaggaaaagagagagaactcattgttcttcgaagtgaaaatggtgaaacttggaaggagcatcagtttgacagcaaaaatgaagatttaaccgagttacttaatggcatggatgaaggtaataatgatggctccttggttctgtaaatgtctgcaggcagaaattaaaggaatgactagattacatgaaacaggacctgaatttcacacatttgtattttaagctaggacccaagttcttcagcttttgttgctgttttctatatcataatgctgaagttccatttaatctaacaaactttattctccgtaatatagaagtataagtattttgatgattccatctttaatcacatacatcaatctttccaataccaaagaaagttttctaagtcaaaaatgagcaagaagagggtgaaataataatggaaagtatgcaaggcatgctgagcattttgaagaaaatatgttcacattttatttttggaattatttctggactctttcagctttttcaagtttctcccagataatttcagtatccttcataaatttttgatttctcttgggccataattagtctttaaaaaatgtttcagggtaattattggggtctgtgttgtttcaatgtctcattctttgacctagtaagactggtatatatctgagcatgtcactttttcatacacaacttcttcaggctgtctgaccctaagaaccagagcaatttttcttagtagacattgggaatagtctggttttgagaataggtgtttgacgcagagttttcctttaaaaatgtaaaaaaaaaaaaattagagaacaggctcaccataacgtctgatgctgagagaaaaatatcagagctaattcttcctttatactcacttcctaatcactccaaatccaggaattatttaaacaacagctttattcgagatataattcatattccataagatccactctttttcaattcactgacttttggaatgcactcagcatagtctccagtgagtttcaaggtgtgaacaaaggagcgaggtgaaccgtagggtacttgaggaatgaccttgggcaaatttattgaactctgtgagcctgtctttcttctgcaaaatggagattaccttcctaacttcctatggttattgttgagaataaataaaataattatgtgaggcacatgtgaaatacagtccttgttacatagtaagcccttgataattatgagttattatcaccattatatttgttctgtagaaaaaattgtcatgccaaaggtttggtataagacacaatcgccaccaaccatgaatttaaagatgtctttacagcaaggtagagggagaatagtaattgttgagtgtctagcattcatgaagcactgataaatgccttcatatgtgaaaaatttaaaaagaaaggatagcactgcaaatcaggtggttttaattccactttactgataagggtgctaatcaggtggttttaattccacttataaggaaactgaagttcagagatgtcaagtaacatatctaaggttattccactgagtagtaaggctggggtccaaatgtaggtctacttcttttcttttcttttcttttctttctttctttgtttctttttttttttttttttttttttttttttttttttgagatggagtctcactctgtcacccaggctggagtgccgtggcacaatctcagctcactgcaacgtccgcctcctgggttcaagcaattctcctccctcagcctaaactaaggctcagagagattgagtgccaaactcaaacctacacgtgtaggtttgttatataggtaaacttgtattgcaggtgtttattatacaaattattctttcacccaggttcaaagcctagtacctactagttactttttgtgatcctctcactcctcctaccctccaccttcaagtaggccccagtgtctgttgtctttgtgtccacaagttctcatttagctcccacttataagtgagaatatgcagtatttggttttctgttcctgcattagtttgctaaggataatggcctccagctccatccatgttcctgcaaaagacaggatctcattcttttttatggctgcatagttttccaaggtgtaaagaaacaatgatgtaatcttctgtcttggattctatgtgttattttggaaaaactggatagcatttccttgccacatttttaaagaccagataaactttggttccattttagacaattcaaaggaaatgcatatacttccaggcttaaagaatcaagtactggagtccactagagcaaaaatgaggatggaattttcaaggcacagattttcttcatgtattaaacttaatagtaatgaagcaaccactacacacattttataattgaagctcagttaatcaaattgtatgccaaactcgaacccttctcgccactcttttcatatccccaaaaacacttcattcttaccagaactttcctctcttcaaaagcagaccagccaaaaaaaaaatcccaaatctgtctttttaaaaagccaacttcttccttgaagggacaactgttcaaagttctagttcagagagaagcataagcacagtttaggaggtttcatgttttttatgttcttttatcctctctgttcccctcccattttgctactgaataactgttaattaacaagataaaaatagttcctgaattaaaccagtgaccaggtcactcaaggtttccttaaaaaagacaaataggccgggtgcagtgtggttcacgcctgtaatcccagcactttgggaggccgaggcaagtggatcacgaagtcaagagatggagaccatcctggccaacatggtgaaacccccgtctctactaaaaatacaaaaattagctgggcgtggtggcatgtgcttgtagtcccagctactcgggaggctgaggcaagagaatcacttgaacccgggaggcgcaggttgcagtgagccaagatcgcgccactgcactccagcctgacgacagcaagactttgtctcagaaaaaaaaaaataaattgtcttaccattatttaatataacgtattaatttcataacaattaagctttatctgtcatctgtggcaagtgacccttgataatgtctgtcttgttataaatgtttactttttcaacccccttctccatagatgaattctatgtgctactttataaccaatctacatgccacttttataaccagtcctgttgtaggttcttctctgaaaatcttaaaactcaagtatttaaaaatcatcttagcaaatattctgatttattaacacaattgtaaatatcagtttatgttcctatagtgtgttaaaatgtgtgaagcctttccatgtacgcaatcaaatttaactagtagaataactcctgggaaagagaagtttaaggagcaggataatttgccccatgtaatgtggtggttgggatcatgatttatggaagttacacagactagacttctcatcttggctccaccgcttactcgttgtgtgaccgtaatgaagcactcaatctctgagccttggtttaaatgtgtaaagtgaggatgcctaatagtgaactaataaggaatagatgagctaatatatgtaaagctcctagcttgatgcctgatatatgagaatcactcaatcagtgtttagtcatagtcacaactgccgtgtaagttgtgcaggagagcaaatggggtctgaaatcttgcccttttcacttgtcaagccatctgccctgacactggcctgtaagacataggggtactttcttctaatttgctcaaagctgctatctagttgccaacctgtgtacctacaaggttgtatacaccccaagtgggcacccttttccaaatcgtacaaagacactacatcagctagtaaaagccctggtcatcgttgattatgatgacacacactcaacatcgccaccacccggaaacagtaaatagatttagtcttccaaacctggacttctgactccacacctagttgtctctctgcactgctcctttgcctctgtatgctctcaaatgaatgatgcctgtgaaagtgctttgtgtagaacaaaagagccacatatatgtcagctggtatttaagttgtccattactaatgaagacacctcttagtttctttgtatgacacaaaaaatatggtatgtattcaggaaaaactgtagctgcaaaataagggggaattaaaagttactccttatcaccagcaagcccagggactgaaatatcagtggttttgctaacgaagtaggtgtattagcaaaggtctattgaagaggctagaatcacagaaaggacagttggtctgggtgtgaagaacttgccatcaccactaaggtatcatgcaacaagaacaactttaactttggcagcagacatagattttgttctagtctttgtcaatttttgttttctcagccaagaaaaagatgctgcaaacagaaaacaaacattcattccccccaccaaattataacgcagcgaactgaattaactttttaagtttaatgaaaaccttcctttaattaaactcacaaagtttaattaaacatgtttaaagttacatctccaaagtcagaccccaaagagtgttttgtagtttgctgttatcttggatctggaattttctagtagaagaggtccttaatttacaaaccaaaagctccagaaatgttctagtcctgccctgtcccatacagtagccactagctccagggaacaacagagcacttgaaataaaattagtacaaatggaaatatgctgcaaatgtaaaatacaccagatacgcgaggatgagtaccctcctccaaatacatatctcattattaatttttacattggttacacattgaaatggtaatattttggatatattaatctaaataaaatgtacctataatcccagctactcaggaggctgaggtggggggattgcttgaggtcaagatttcaggagctcagcctgggcaacatagactccatctctaaaaaacaaataaaaaattaatttcacctgtttatttttattttttagtgtggctataggaaatttaaaattacatacccagtttacattatatttttactggacagtgcctctctggacagtgtgtatgctttgttttacatatctattttgttttaacacaaaaattgttgctacctaagtattacacggaaggctttgagtatatatgaattatgccattatttaaaaatcccaatcgctgtcttggaacaaaatgttgctgaagttcccccaaacaattttacaatgctaggaacatattttcttgtcattgctgaactttcaaatgagagcaaatgaagtttttaagataatacattttagattgaatagttacactattgttttattgtaaacaggaaagggaaattggtacttgctatgtaacagaaaattttttaaatttactgtctgactacataaacagtatcttagaaacagacttctcagaagttgccaattgggttcatttcaatataatttaattgtttttgccatgagaccaatagtgttaagtcattgtagaagcagttgagcactgatgtgaaatgtgtagctttatgttgtgcacagcaccatctgctggagaaatctagtaacagttttgaaaaattcccaaggagagaataaaaatacaatttaaccaaatcaggactgtggttggggtgcaaaaaaaaaaaaaaaaaaaaaaccatagcaaaatactgactttcagcctattgccataaactggcattttaaatcaattgaatgatgtccatcgtgttggaaaggaaaggaaactgtagcagaacagtcccccaaactagtagaaataaaaattctagtttagaaatgaaaattaggacaaagcaaataagcattaataaggacaggtttttaatgcatttgcatatatggatttgccagaaattacatgtctttatgaaacattagtggatcaaaataatgacataagccatcctgccccccaccccccatatcaggcacagtagagcttttagccctctgagggcagtgaagcaggtccacgaggttggacatcagcctccactacctttagtgttgatgtgaacagagagaccagtgtgccagaaactgcaggtctaagcttttggagtttagtgtgttctgtatttgctgctcatgcgaggttattgattcattgtgtttaagacactatttatgatcctggattttgaagatagaatcatattaattgatttttcccttagatgtaacagtaatggcttaaacaatggggtgaaaaaagtgacatatagggactaattgcctgaaaccatgtttttatttgcacaaatggaaaagtaaacaaatgtaagtctcttaatctgcagtcatggaagaaaaccttagaaggattattccagtgtggccagacgtcccctacttctcttcctccaggaagccctccctaatccccagactcagatcaaactggtaaatacacccacagtaccataactgcaactttgaactttgatatcttccttggtgcactgcaaaagtccaagagggcagagaccaactctgacttgttgacagccattatgcccactgcatataacaactcttgatacagagttgtcagttcatcatagtctgttgcatgaacggagaaatgaatgacttgtgtcaggcatatgccccccctgctggtgacactttttctcaatccagtgacccatacccaagagagagaaaaactttctggaagaagggaggctacaccaaatggagagaggaagtctggggcctggggaaggctctggggcaggttatggtcattctacacacagagtacaaagtaatcttaaatgtcaacactgaaggtagagttcaaaaaatggtcacatttgtccctgatttttaaagtaatatctcataagcacataatgattaaaaattaatcttctaaaaatagctttaaaaatatatgattgtcagaaattatattaatagactgctaaaactggagggaaaaacaagcaggtatatcattgtttccagacattctgcatcatcagcacttattacacgtgcaaatctaaacagcaaagaggatctctaccctgaataaagatgtgaaataatgctgacccaaatatatataaaccagatgacagaattggataagaatatgagttaaacactaaaattataaaaggtgcatggagcctttcgtactatctttgccatgccccatgaatttataattattttaaaataaatgttttttaaaacattgaaaagatctctatgatgttaacttcaaggaagaaggatcaagttatatcatttgaggatttttccctataacatcttatgtgaacttattatgaaatttgtgtattttgatggagctgaactttaattccaaagggataaatgcctgtagttttctaaactagttcagtaaatatattacaatgctatgttgttctacatattctataactagagttgaatattatagatttattttttattttcttcatttctcccaacttatttgatatttaattttcagtaattggtgattttctttaatggaatgaaatggaaatgatagcaattcatatttatattttgtagagaattatttttaaaatataacttgtgtattttcttagatctgctacagattgactctctggctgccctcaaaagctgtgtgacctcgaaaagaatatataactcttctaagttattatgtgaacagaattgtgctgggtggttttctgtcatttttttttgtcatatccatcccagaggaaactgctcatcctaatcacatagatgaggaacatatggctcagagaagttcaggaacttgcctgaggtccaggtgcactgactatagagctatatttcaaccctgggcacctgtctacagtgacttaccacagaccccataacttgctttttgaaatctaacattctaaaaatcctttactttttcacctctcaatatcaaataccccattcttagaggagctgagaaaagcctgcacctgactagaaattaaccctgatacacaaatcatcctttgggaaaccttgaggccatttgtattccttccatggactattcacactccaccctgaccaggtcacaagtagcctttgaaatctaaattgatacaggaaacagagctgtgtccccatttaacgaagtgatcgagacatttaattgtgtgcccataagagtgaggcaaaaactaatcaagatggtcatttgaaagcgttaagagtaacccatttagtcagaacatgatttcagtcatgttatttatgcttcgttgtattatggtctccataaccatttatatttgcaaagcattttatgattcttgttgtttgtaacaaagcctcagtcacagagaatgctgtcccaccttttacaaataaactgagttacaaggtgcttaagaaatttatcatttatctatgaggcaagaaggctatagaacattagtggctctgtaatcaggcctgctgcttagatgggtcaatgagaagtcaggtcaccttttcgaccacggcatttgcaaatctattcattactcatccgtttatcaaccaccactcgtgtgaggtagtctgcaaagacactgttaaagagtggttgaagtccatgtctgtgtgacttcatctctttccaacacccctttcctagacctaggttctaagctctaaaactgacgagctaaatccatctggacaagtcacttcacctctctgaacttcagacacctattttaccaaaatgctgtgtgggccaaatgataattgacctgacacaaaatagaccttcagtaagtgtaaagttcaatcttcctcctggccaaaactgcctatttcagaactcacttctcttttccctctaatcctctttttgtatgtgagaatttagtaacagattttaaaaagagagaggagagaggaatttcagggtcttttcatagtctatggcattatgaatcaccctgaaaggtaagaagctcttatgtttatgttctattgtttactttacagcaacttatgccatttttctccctcaattctgtagctgtggagttatttagaatatccttttaaaaaacaaaaccatataaaagtaatgaatatttatttttgccaataagcttttcttctcatattaaaccattcttattttttatagggtcctgttgtcatgtttttaacaatttgggttctgaatttttaagacaaagtacaggatgagagtctaccaagacattactttttcaaatgtgtcaaaaagtcacctgggtagagtgtgaaaacagatttttaggtttcactccaggtctgcctagtcagaagcccagcaatctgtggtactaacatgtagtacgattgtttcttacgaactggccaggttggaggacattgcattaggagctaggaactctgcagatgtgaatgtgatagtggcattgcatttgtgccgcagattattttgtcgagcttttttctgtaatgtataggatgggacaaaacaaaggattcttggtaatatattgctgcttctttgacctaattagtaaggaccgtttttaaaatctaaatacatataagttcaatcccagaaagaatattggcactgttcatttttacattatcaggctttattactatttgtctggaaatctgacttctctgatatacttttatcttattttattttatttctttctttatttttgagatggagtctcgctgtgtcacccaggctgcagtgcagtggcatgatcttggctcactgcaatctccacctcccgggttctagtgattctcctgcctcagcctcccgatagctgggattacaggcacctaccgacacacctggctaatttttgtatttttagtagagacagggtttcaccatgttggccacactggtcttgaactcctgatctcaggtgatccacccaccccagccttccaaaatgctgggattacaggcatgagccactgtacccggcctctgatatacttttaaaatatgtaatacaaaacttccagaaagaggtttatattcttatgaaagttaaactcattttgtgtaaatgttcattaagtaaacagtaatttgagttataaacacatggacataatagatttcactgtggattaaaaagtaggaagattagaaccactttttcacatgcattttttttaataaaaataaaactaggccaggcacagcggctcacgcctgtaatccaaatactttgagaggttgaggcagaggattgcttgaggccaggagttcaagaccagcctgggcaatatagcaagggccagtctctacaaaaaaagtttagaaattagcagggcgtggtgatgtacatctgtagtgtcagctactcaggaggctgaagtgggaggattgcttgagcccagaagttcaaggctggaatgagctatgatcataccactgcattccagccaaagtgacaaagtgaaacctcgtatctaataaaataaagtaatctaaaagaacaaacaataaccagtctctactagtacgtatattttatagcaagacttaaagaactgtacagttgtttgatgtgaaaagtgtctgagtctcattgattcccagctgatttctttggtagatgcttgtttagcacctgctgtgtgccgggtctcaatatcaaacatcatttaatttaatatagtttaactatggctaccttgctctttatgaaaagaacacctaatttttaaaacaactaataattttattagactcaaaagccttaggggaaggtactcatgatgccgagcaatgcggcccacagtcagggtgtgagagttagctgagtgtggagggtccttgcctccttcccccttggggcctctctccagctgtctggggatttcgttctctattttccagcactgagctaaggatattttgttttgtatttcactttccttttttaaaagcaagaaacagggaaaaaacaggtttgagttgaatgtgttaacacattaaaatgttatctagggttttatttacatataatatttattaatgctaatcctattaatggtcaggtaataagttttcagatcctaagaattctgtagtgacattactgatggctttacttcctccttttgccttttcacacttacctactatctatgtcatttattttttttttgacttatgcaatatcctagaatttcatagcctagccatcaactgcagcccttgaagaagagattatgcctttctttacaaaagaatatttaagtaatactttttgtatatttttgtatttttcttggcttttattcttagagaaaaaacttataaatatcttaagcacacaaacaggatgaaacctggttataagaaaccagagaggctgggcgtggttttcacgggtcatgcctgtaatcccagaactttgggaggctgaggcgggcacatcacttgagctcaggagttcaataccagcttggccaacattgtgaaaccccatctctactaaaaatacaaaaattagctgggcatggtagcgcatggctgtaatcccagctacttgggaggctgagacaggagaactgcttgaatccgggaggtgaaaattgtagtgagcagagattataccactgcactctatcctaagcaacagagtgagtgagaccctgtccaaaaaaaaaaaaaaaaaaaaatagaatactgtttctccatttcatcatgtagacacctggaaatctgactgttgaagaaggcagtgcatgtgattctatttaaggaatagtacatggagacactaaatgtcccccttgcctacagcagtgcctgaaattcccacattagttgtgtctttgagttggggcttatcttcaaaatactgttaaaatgtacattgaaggtcaataaccatgcaagttttaatggtgtcaaaagaattgctaaaagctttgaaaaaaaatgaacacaacacagagggtccctgagctgctgggaaattataaaatatgtcagaatttgaatgtggagggtactgatcgcttctcctcggagcttctctgtttatatagttagaaatctgagcatttccacttgcaacttgtctgctgcatctgaaatgtacatgttcactttatatttggggtggctttaatgccttatcaaaggtgacagagtagagcttaagtgtggtcagcctgcctctatcacgcaaagtggcaattcttctcaattcagtgctgtcatcgttttcgggggtgttatagctgtttctttctacttttaatcctcacaaatgtgtgcacatatacccagaactctctcacacacaaaaatagctaagaagtgtacagtacttccagttccccaaaagatgcctcagttcctctggtgggtctagactgatctcaagtaaatttcatactcacaggatacacagcttgttataagcagaattaggaaatctgccccatttgaaggatgtaatttcatgatctgtcttcttaaattgctagcaccataaggagtcctgagccattttgaaggagaacatgacatctttgtggctgaagtgaaaaaatatctgcttagctgatgatgatatgttgtatagcgatttaaacagataatcagaactttctcagttgcagcatgagttatgaacttgaggaattcactctcttaagccaaatcatggagagggaaatatatttgctttctatggaaaacgtttatctcctttcagttacattgaataggtgaaaactcccccagaatattctcctaagcaaactgtttgattctttcctatttttctgtaggaaaactttctttttaaaaattctggccgggtgcagtggctcacacctgtaatcccagcattttgggaggccaaggcagccggattgcctgaggtcaggagttcgagaccagcctggccaacatggtgaaaccccatctctactaaaaatacaaaaattagctgggcgtggtggcacacgcctgtaatcacagctacttgggaggctgagacagaagaattgcttgagcccaggaggcggaggttgcagtgagctgagatcatgcccctgcactccagcctagccaacagagtgagattctgtttcaaaacaaaacaaaacaaaacaaaattatttgttttcttttcttttcctacactaggatttcagtgtttaggtttacagagaagaagatacttgaggaggcaaaaaggagtaaaattgcagttccttttttttctaatagttacttttttaattaaagaagaaaatagttctatagtcattgttccatttgggaaatcaatgtttgataataaaagttctgttggtggctcattttttaaatctgggttgaaccctgtttctctcctagttgataatttgatcctcccatctcagagtttagtggttgatccgtaaaatgaaaaagatgtattgatccaattacctaatcattcattttgtcattctacaagtttctatttgaaataagccataatctcagcctcacgtatctgataaaggaggcagaaatgttaatagtgaagggacagggggacctgtgcagtatgtatcggaggtctgaaaagagtcctgtaggagtaatgaacaacaaaacaaccccccatcccccaaagtttgggaatttttcctttattttgttaataggtaaaacaagcatagctatatcaacccaagggtaatactccctgttccctaccctcttctcatcttccttccccaattccatttcctgttcctctgaggtaaccattgctaacagcctagaatgtttcttctacatatttcttataaaaatatacaaacgtagcctggcgcggtggctcacgcccgtaatcccagcactttgggaggctgaggtgggcagatcacgaggtcaagagatcgagaccatcctggccaacatggtgaaaccccatctctactaaaagtacgaaaattagctgggcatggtggcgcatgcctgtagtcccagctactcgggaggctgaggcaggaggggtgcttgaacccgggaggcagagcttgcagtgagtggagattgtgccactgcactccagcctagcgatagagcgagactccgtctcaaaaaaaaaaaaacaaaaatgtgcagattacattttcccctataaaggatgatcctgtgcacattgctgtgcatcttgctcaggtgtacagcaatttccgcaggttatacagggcagtcgctctttgtctggctccctcctatcctccctccagtctaccctctagtgtcacatctcaaatcatcctgttcaaacgagaaactctcctcccacccccaccctccctggtcacattctagtccctcactttgatttattttttcttcatatttgtttagtgatgtatctaccccctttatcccctattagaataaaatttccatgtgagagtgactttaatttcctttctaccctatccccagtgactagatcagtgctctacatggtggtccctcagtaaaaacttggtaaatgaatgaattggaatcattctgtttactaactgcaggaatgtctaggatatgggtaaactgttacttatgtaaccattcccttattcatagagatgcaagttctttcaagctttagtctttataagcaatgctgccgggtgctgtggctcatgcctgtaatcccaacactttgggggtccaaggttggggggatcacctgaggtcaggagtttgagaccaggctggccaacatggtgaaaccctgtctctactaaaaatacaaaaattagctgggcgtggtggcgtgtgcctgtaatcccagctattcaggaggccaaagcaggagaatcactagaactgggaaggcagaggttgcagtgagccgagatcgtgccattgcactcgtgggcgacacggcgagatctgtctcaaaaaaaaaaagatgtcagtaaatggtattgctgcgtccagggtaggtgcattttcaatttgaatagatgatgcccagttacactgttaaaaaattattgccattcacacccacttgcagtaatgaaagcacttatttcccttaatttttctctgataacaagatgtgattagtgtttaattttagctaatccaagaagtgggtgtggagggagatagtatctcattctaattggcatttccatgtaaattatccagtttgaacattgtaatatgttttattgaccatttttcagcttctgtgaattgcctgtttataatattttgctatcatctattgacttatctgccatcctattattaatacgtttggtattgagcatattaatcttttacttgtcaggtgtggctatttttccagtctactttttgcttttcaagtttactctttttgtcatggaaatctttacatttttatgtagtcaaatatattaccttttatattatgcttttaggcttctgggtttccagttttgtataggaaagtttcccctaactaaagcgaaaccatattttcctgaattttttggtaagattttaattttttttttggaaatggagtctcactctgttgcccaggatggagtgagtggcgtgatctcggctcactgcaaccttcgcctcccaggttcaagtaattctcctgtctcagcaccccaagtagctaggattacaggcgcatgccaccacacccagctaaattttgtactttttagtagagatgggatttcaccatgttggcccggctggtcttgaactcctgacctcgtaatctgcctcggcctcccaaagtgctgggattacaggtgtgagccaccacgcctggccagattttaatttttaaaaatagttgtctcctaagcaaatgtaattttttatttatatacaataagatgtgatttagctttgtttttccaaatagatttcctattatgtaaataccatcttttaaataaatcatctttctctcacttatttgaaatttaaatatattaccttgatttaaatataacttaaatacataatacatatataaaagtatatgtggatttatatatattcagtatacatatttaaacttgaatctatttcttgattctctattattgtcccccaacctatttgtctattcctatgtataattcttatatttctatatgtgtgtgtttaactgtttaattattgtacttctgagtaaatcttaatatcatataagataaattctccgtcacaaacctacttttccaaaatactcttgctaatctcaaacacttattatgccataaaaatttttaatcatttattccaatgaagcccaccagaattatgcataaaatttggctttgaaacacacatacatacacacacacacacacacacacacacacacacacacacacacacacacaacctggatggactggagtgagagaggtgagttggttgggaggtggtcttagcaattaggcaaactaaaacagggcctgaacacccgggtgacaggagggtgagccacgtccaaaagagaatcaactggacttggactttgaccatttgttaaggaagttgagtcataactattagagtgaaggaatgagcagattgtaaacccttcctagagttaggactatggaggaaagtacttttggaggtagacagcagggaagaagatgtatccatttgtggacaggttgagttccacgcatgagagccatcagtgggcacaaagaaattggtgatgatgatgctaaacatttggataactttaaaatatttgaaagaggtttttaaatgaagttctggaactttcaggcatacttaagttcttattcactttcttatgaggcctcacttttttttctttttcctaactcatttctacttttggcagcttgggggcaaattattgtaaattcccattcttgttcttgaaaactgggaatttatccacaggtggcaaaatgtcagttcttgaaaatgtttgttcccactctgtaaaaatattttctacaaatacttatattaatagttttataatatttttgcaaaacccaatattttatggtcactaccattttctctttatcataaaaactgtttaggctatggagtataaatgattttgactattaaaatgatgtattgcctgggcccagtggctcatgcctgtaatcccagcaccttgggaggtcgaggcgggcagatcaccggaggtcgcgagttcgagaccatcctggccaacatggagaaaccctgtctctactgagaatacaaaattagctgggcatggaggtgcatgcccgtaatcccagctacttgggaggctgaggcaggagaatcacttgaacccagaaggctgaggttgtggtgagccaagatcacgccattgcacttcagcctgggtaacaagagtgaaactccatctcaaaaaaaaagatatatcattttgacttaaggtatgttgtagatatgcttattctcatggcattttctttcatttgtcttttcagaacttgatagcccagaagagttagggaaaaagcgtatctgcaggattatcacgaaagatttcccccagtattttgcagtggtttcccggattaagcaggaaagcaaccagattggtcctgaaggtggaattctgagcagcaccacagtgccccttgttcaagcatctttcccagagggtgccctaactaaaagaattcgagtgggcctccaggtaatgttcacaaaaagttgtttccctcagtatgcgcagagagcatgtgagtgcatgttttgctctggaaagagttattctaacatcctaatgatactgctaattaggccgtttggggaatcatttacctatttcagataaaaagcatcaagtataaagttagcttactggcttgttaaataaggtacatattttagggttgttctgtttaaaagtctcagttggtttctgatgaaaaataattttttaaatcataggttattggtctcagtatgtggaacaacataccaagccatggtttatgatatgccacatcataaaaatcagttatagtgaagcctgcagactttagtgttttcatttgattgaagtaaatcataaatactgggttttatccaaaccagttggaacttgatttggtttggaaagctggctggaaatcttggatcaaaagatttttcttgtgtttatttcagctagactttagttctttttttctttattgaataaggaaaatgaactaaagtaacttaatagatgttattaatattgtaattaatagtttaactgaaggttcatgttcttcttgtgaggctggactctcctgcccaatggagttaactgggttttgtttgtttgttttgagccaagcatacttaagtcctgagatgacctttaataagtagttagcactaacgagaccaccttacatttcaggggtatgaagctcccttcacctgcctcccataccaagttattttaccaaacagaaaagaaaccaagtggtagaagagaggcttagtagactagaattgaaatcttttgaaattttgaatgcattttgttattaactctgaaagcctcggtttttatgtgggtatgagttgcctttaggaggttttactgaatgtcctgcataggtttaaaatatattggactcagcatttattgtcctttaatctggactagactaagaaacttctatgccgtgagactggatcccctctctttcctgcaagccagtgctatttgtgttctactggggaaatactcagactgaccaattcctgtcatagtgtttggtttcgtttattcatgctttcctaaaatagtaagaaaggttaaaaaagacctgggttttttttttttttttttggttgtctgtttttgtttttttccttctcacttaaaaagtaaacttcatgattgggaaaaaaaaaaaaaaaagtcactttcatttaaagtcctttctctgtctctaggcccagcctgttccagatgaaattgtgaaaaagatccttggaaacaaagcaacttttagcccaattgtcactgtggaaccaagaagacggaaattccataaaccaatcacaatgaccattccggtgcccccgccctcaggagaaggtgtatccaatggatacaaaggggacactacacccaatctgcgtcttctctgtagcattacaggtttggttaagtcactgctgtacttcctattgattcacaaagattgtgtacaaagatatatttgtgtacaaagatataaaacctttgaaatatccatgccaacattataagagaaaataaaagaacaaaacattttacttgtccatcacctcatctctggtttcccaaggatcatttcttgggaagatcctggtcaagatcctggtctcatgactcatttaaaatttagtgatagcatctttcctgctattaaggttagcattagtagaagtatcattgaatctactggagcatctaggtaatttctagattcaatctaggtaatttcttggtgacctagacagaggtaatggacttagcaacatactttaaactacaaggaaattgggtggactttgggaaaaatacatgtcccacagagcactagtaataggaaattgttcagtacatggttattctcacctactgtactcgccagtgtaatccgagagtttaaacattcagggctcagaagaacacattttgtgataagcacctggaatctagagctcaattcatcctttgattatcctagtccgatttttaactgcaattccaagattattaaagatagattttgtttttgatcttcttttgttctctgaggagtaattttaatggctgatgcccctttttaccctcggtaattaattgtacagaatgccatgtacagaatgagctgtttcttaactttggtagttcttacctttttaaagagtaagaggctgggcgcggtggctcacgcctgtaatcccagcactttgggaagccaaggcggtggatcacctgaggtcaggagttcgagaccagcctggccaacatgatgaaaccccgtctctactaaaaatacaaaacttagctgggcgtggtcgcaggcacctgtaatcccagctactggggaggctgaggcaggagaatcgcttgaacccaggaggcggaggttgcagtgagccgagatcgcaccattgcactccagtcttggcaacaagagcgagactccgtctcaaaaaaaaaaaaaaaaaaaaaagagtaagagacttaattatccatctgaaacaaccaatctttgcacttacaaattgcatttataaaatatacttataaattgtggctgccccaagtttaagccattcattagtacccagacaaaaaacaaggaatttttttttaatttaatatcatcttacaaggaaatcacaataagcctggtaaaagtataaaaggagagtagagaggaaaactacctttagtacacactattaaactgaaggtgttgaagttttgccagtttgtggctatgcagaaagaagaacaggatctgatgaaaattttacaaggagcatctcccatgataaagtcaacatatctgctgttgttctctcagggggcacttcgcctgctcagtgggaagacatcacaggaacaactcctttgacgtttataaaagattgtgtctcctttacaaccaatgtttcagccaggtatggaaataaaggattccaaaaagcagtaaggaattagtttttattaccttttggaaagtaaaaattgttgtgttcaatactaaaaaaaattgttgtgagaaaaaaaatccgtagtatttgcttatcaaaattatcctcaaataacaaacagagggtttctgtgtttgatacatcgaaaaagcatctttgctgtttaaatgaacaagttaataacgttttgggttagttcctttacatattctgatttttttaattgtgagtctttttaagatttggcttttaaatagccacattttcatacttctgttttttgttttgctcagattttggcttgcagactgccatcaagttttagaaactgtggggttagccacgcaactgtacagagaattgatatgtgttccatatatggccaagtttgttgtttttgccaaaatgaatgatcccgtagaatcttccttgcgatgtttctgcatgacagatgacaaagtggacaaaactttagagcaacaagagaattttgaggaagtcgcaagaagcaaagatattgaggtaccttgttcacaaaaacaagttcatttcattacgtactccagatatgaggttttattttgtggtcttaatagcactcactataaaataccaagtgcattattgattttacttttactttaaaaaatttgatatagattaatactcaaatttttttatcttttttaatttaatttaatttaatttttttttttttgagacggagccttgctctgttgccgaggctggagtgcagtggcgcggtctcagcttactgcaacctccgcctcctgggttcaaacaattctcctgcctcagcctcccaagtagctcggattacaggcgcctgccaccatgcccagctaattttctgtattttcagtagagatggggtttcaccatgttagccaggctggtctcaaactcctgacctcgtgatccacccaccttggcctcccaaagcgctggcattacatgagtcaccacgcccggccaatactcaaattattttaagtgtctctggggctgtcttagctggttaaaacatagcactaatgaatttaagttatggtctccattttcctgtggccacttgagttacctacttttcagaatcactgtttatacacattactatgattttcctttttcaaacccagtgagcatgtaagtatctaacagtgcaaaaaaaaaaaaaaagctttcaaaatctatacgaataagtgattgatgtcaggcacattcttaaatatttttaaagttgccagaataaaaataaatgtgtaattctgttctgtatatgtccatgatatggattccaattacagttggtgagttgtaagcacacaacattatttttgttgcaaatagcaccacagaagtaactgcctaatagagacacgtgtaacatagtaacgtcagtcttttaacgttacgtgacataaaatctcaaaatattttaaactcagattaacattaaattgtttatttcttttactctaaaaggttctggaaggaaaacctatttatgttgattgttatggaaatttggccccacttaccaaaggaggacagcaacttgtttttaacttttattctttcaaagaaaatagactgccattttccatcaaggtaaatcatctttaacagagaatctgtgaattatggggaaaaaatactcttagagaataaaaataaaaggttttaatgatttatttaatttgaaataccccgtcaaatctgaactcataaggtcagattttgttctggttctaccagagtatactttcaagccagtaaagctttacaattggtaaaaaggatcattatttttcaaagagtttaataacatttatgtttaagcaaacatttgtaaaaccaaacaatttagagtaatacaatgtgttatttctggttaatgttcagtaatcaaataatggatgaaatgcaaatacagtattcaagtttcattttcatttctggtggagcccagggacgttctagagggatcaccttctctctccaagaacagaaggagagaggaaaattgttttgtcattattatttgctgttactgttgcaaaagctggagctttcagaaaaaaaaactgttagaaggaaaatgcacataactcagactgtactatgaattgtcaggattagatcatcagacacaacaatcctgcgtttaggaatcgggcatctaactcttgctgagttcagatgtgaccaccccggttgctgcataatcgtaatcatcatcttttccctttacctttcctgcctctcatagggcttgataaaacaaccatgcttaactcttatacagttaaaaatcctcagataagtctcattctataaccatcaactaccaaaattcttctagattagagacaccagccaagagccctgtggtcgtctgtcttttctgaaagaaccaaagacaacaaaaggactgcctcaaacagcggtttgcaacttaaatatcactctgccagcacataaaaaggtatcttttaatactgctttaaattgtctttccctggtcttgaagaagtgggcctttggtatgcaattaaggaatgctttgtaacatgaataaagctcttgaaactgaagttgtattagtctcctcgtgtagattgcctaagtcttgttaatgtggtgtcaaattcttatagtttgtatgatggagtcttctctgtttatcgcttttgcttctgctggtagcgcatagatttttatgcttttaaataacgtcatatgttaatttgccatggatgtacagttcttgatattttttgttggctttttttaaaatttgctttgctttctaaatcagcttgcatttgtgctccctactcagtccttttcatatcctgatattcttttccctgctgtccattataatattccttgtctctgcaatgcatcttggaaccaaaaggagacagagtcagatcaagatgatgaggtaatataaacacttctgcttttattctatcagaagtagaatagaaattgaatctgtatgacagaagttgcagagggctaaagtgtgggaaacatataaattatatttttcaggtcttaagtaggtaaaagggtatatatttttcttaaatggttcactcttcttccacacgtacttaagagtacttaaatatattcaacgaaattataattcagctgatgattcagaaactgaaggtctttaaacatttttaaatatggtagattggcatgtataaataaacgttaaaaatttttttagacaagtcaagtgcaatagtgagaaagggggaaaagagtaggaccaggaagttctatctatgactgacgagaacagtcaactgagataacgcactaccttcgaacccgccaaatagacattttgtgaaagtttcatgtgcctattttactatcaactatatcctactatccagcatgttataacatttaaatcaagatcacgtttaatatgtgcaattttattgtacaaataaacttatgttgtatgtgatacaaaatatttgcttactagctattgataaatctttgatactctcactaaagaaatttatcttgaccatttttttaagaatatagttcaattaagttgtctcctaatgtttctctaagttatatgataattaggtttttgaatcccacacatcaatagtaataaatagaatcaagtagccttaggatgcagtaatagtacctctggccaggcgtggtggctcacgcctgtaatcctagcactttgggaggccgaggcggggatggggtgggggaatcacctgaggtcaggagttcgacaccagcctagccaacatggcaaaaccctgtctctactaaaaatacaaaaattagctggacgtggtgctgcatgcctgtaatcccatctactcaggaggctgaggcagaattgcttgatcccaggaggcagaggttgcagtgaggcgggatctcaccactgtactccagcctgggctacaagagcaagactccgtccctaccctcctctgcccgccccaccaaaaaaaaagtacttctaacaaaaccattcatctgttttcaatctcctcatctacactttatgcctgttaacatacagaatccccagcagtaattggaataataaactttgtgtgcctttctcccttgaatgtactcacatagagtgagtgtactttgtgatatatgtgctttcaatatgaacagttccaggaaaatttaatgctcagcatcagaagtctctgtaatgcttgtcttttacttgtacttccctgtagtctgctgtgttggtgctcttaaatttgccaaatgatgattttggttaagacatggggggtggggttacaaaatcccagtgggaaattaacatttcctaagaaggaaaataaacaagttatcaacatgccatcctacaaaatgtcttaaaactgaagatgtcacagggaagttggaaatagagttgtctttttttttttccttttcagattgagaaaacagatagacgacagagcttcgcatccttagctttacgtaagcgctacagctacttgactgagcctggaatgagtgagtttcctaacacatttactaatctacgtggattttcataagaagagacattttttctatacaaaccaaattttatcatttggaaactcaatggcaaaagaaaaattgcctgcaggaaaaccctgtcatacaacctaagtaatattttgtgcctagttgaagatgtgaggtaaaaacgcccctagctcatacttcaaaacagtttttaaagccattaactatttttaaattagaaacatgtattacttttcttttaaaaccttgatttttactttgattaactatgctaggagataaatatgaatgttgctttagatctatgctcagatgaaaaaaattactcaaatatttggaatggtagaaaaatgataaagttactttgtcatctcatttttctcagtatagataggttgtcatatcctagtcccgattctttttcttcccactttgcaagaatcacgtttccttaccttcttgaggtagcacttgtttacagagttcttctttcctccctccctccctctcacttcctctcctcctgtcctttattaaaatatcagttctaaggctggtcttcactagaccagttagacccttttcttttctcaatgatcgttttggttcattgttagctggcatgcacttattaagatacagattcattcagtcctatctgtttatatattctccctctctctctctctttctgtctgcctcctcctccctttccttccatcatccttgtaatcatcacctctggtgatctctacagccctcaagataaccccctccaccagcaggaactaagggtattgagctcagcattgtatttgactgacatattggtgccactttaaccattctcctcattttaaatgaggggaaattatacaaaaattattttttaattagtgaatcattcctagctgtttcccactgacacagtttcttaagttcaaggaggtctggaaatttgccagtaagagtcacatctttggcttttcccaccttttctgaagtcttgtttttatgggccaacagcatagcatataagatctgcggcaggacactactgcaccacttagttgagatggtcttagcgtcatcttctggagcctagctccttgactattagagaagtttcaatatttaaatacaaaatggagaatataagagaaatgaaagaaacctaccacattcaagaatgtttcctcagatctctgttctcctctagcagaaatgtcgaaatcctcccagaaacataagggctgaaattaactcatattatgctacagagcagaagaggggtgtgtgtgtgtgtgtgtgtgtgtgtgtgtgtgtgtgtgtgtgtgtgtgtgtagctaggtagctaggtggtttccagtagaattaaatacactggggaagttttctttggaatactattttgccctagagatcctcagtgggtagttggttgagaccctgtaggcaacatcgttaagctttggacaggctcaatggaccagccgctttaggtcggaggccccttcaggcaggtgagtttccatctgattctggttgctaaggcaaagtcaattgaatgtttcccacttataatagtgttactggttagatccagctaaggtgtatgcagcttgtgttcctggacttttggtagaagaggagcgaagttttctgttttatgaaagggtacataagggtggtaaacaagggaatgaataggaataggaagtgactaaaagaaaagtaagtctcaaaactggtgttatgggaactccaagtgaatgccacttttccttcaccacgctgcctttccaaccccttccccccaggaaaaagattctggattagttcggtgcctgacatccagaaattccctcttataaagggatcccaaaatatatgtcattaaagcataaaatgtgtaactgattggtaggttggttgttccttgcgaagtataaaaccatagacgtggttcaaaagatttctttgcctgatagagccagccttcagtggtaaaggatagatgctttgtcagtgtctgatagttacaaaaataaatgcttgtgagacacagactaagctcaaatcattgaatttgaaggaatctgcaaaccttccatttgcagcgtggcatttccaaaagagttcagcaatataatattgagaattatggcaagaaggggtaatgaataggcgagtttttccttagttcttccactttctttagaataatatgtaagcctaggaaaggatatgtttggaatgtttgaatttaaatgtacactagaaatgaccatcttcacccttgtgagagtagctgctaatccaaagactggactgtagcaatggcacgggcacagcatgaagaagaacataaaagctgaagcagattctcattttctctttgagtttcactattctgaaccagggctttcttggagcaaaactgtattcacctttgatgtagaacattagccgttggcaggccttgcaaatctctgaccagtttggtttgtttgagttgtagaagcagagaggaccaagtatgtgtttgtgctccccagcaagtgtgcttacttcatttgtgtgtttcttgctccattgccagaagaaatgctggtattactatatccattcttcctagtggtaggtctccctcgtgactgcttcagtgtttgtgatatccataagtcccatgaatattatgggaaggcaccagaattggtacctttgaaattgataaacatatatacacacaccccacatatcctactgtaggtacttaaatatggggtgttaaaaatatgaatgtagtttttagatgtcccccatgatagcttttgaaaattaaatgtagattaggttatgaaaaaatatctgagataaactatatgcttttatccatattgaagagttgcagacatggacgtatgtagttgcaggtcattttataacttgcagtagaaaatattttcctaaaatctcaaaaggtaccaagacttcatatctcatggaaaaagtgtactcttctttctaaatgcccttgtgaaagtatctttaaagtttatatattgtgcataatatggcatacgaattgtattacttcattggcttgtttgccatgatatattgtgcatgataaaatgttttcagttgctttgcttgcttatggtaaccatgaaccatattttctgtttttttctttgtgtgtgtatatgtacacatgcattttaaagtcatttcatattatgttttcttttcctctcatcaaaaggaatatactgcatggaaaagataaatgcaaacattccttttctttgttttttttgtttaaaattctgactcagaaaacttcttgctcttattggctttttatgggtgtaaagcataaccgaactgtgcatgggagatacagatttaaaatccagtggcttcacagtttgcacatcagttgcctgtcacttaaaagttattttggattctgcatgaaataggcttgagtggttttggaaaaaagttttagatatttaatgtatagctacatatattgaaatggttctaagtaggtgcaatctgtatcatggaaaggctaaaggagagagaggacattagaaattactaaaatgaaagttgtatggttgcacgaaacaaacatgtacctatacaggcaaaatagaatggctactgatatttcaaaaccaacacataagaaagtcaataggaagtagggaacagttttccattatggttatttttctcatcattaattctttcctcatgttttctatttttcattgtttgcctctttggttgcaatgtgctttttctttcatttcacattactctgttttttatttagttgtttttttttaacttcagattagttatgtctgtagaaatttgtttttcctcttaattgttccttttgcctcttccattctaaatcatgcaaacaattgtacttgcttttgtaatatttcaaagtttactgaccaatttttttctctggtctctctgtttctcaaccatttttgttgatttttgtgtttgatttcattttaaaatttaagaaacagttgaacggagtacaggagcaacaagatccctccccaccacttactcatacaagccattcttttctacaagaccataccagtcctggacaacagctccgattacagtgcctgggccagccaagtcaggcttcacttccttatcaagttcttcctctaatacgccatcagcttctccgttaaaatcaatatggtctgtttcgacaccttctccaatcaaatccacattaggcgcgtcaactacatcttcagttaaatccattagtgacgtggcatctccaattagatcctttcggacaatgtcttcgccgataaaaactgtggtgtcacaatctccatacaatatccaagtttcctctggtaccctggctagagctccagcagtcacggaagctacgcccttaaaagggctggcatccaattctacgttttcctctcgaacctctccagtgactacagcagggtctcttttggagaggtcatcaattactatgacaccccctgcctcccccaaatcaaacattaatatgtattcctcaagtttgccatttaagtcaattattacatcagcagcaccgctaatatcttcacctttaaagtcagtggtgtctccagttaaatcagcagttgatgtcatttcatcagccaaaattacaatggcatcttctctctcatcacctgtgaagcagatgcctggacatgcagaggtagcattagtcaatggatctatttcccctctaaaatatccatcatcctcaactttaattaatggatgcaaagccactgccacgttacaggaaaaaatttcttctgctacaaactctgtgagctctgtggtcagtgcagccactgacacagttgagaaagtgttttctaccacgactgcaatgccattttccccactcaggtcatatgtttctgcagcaccatcagcttttcagtctctaagaactccttccgcaagtgcactctatacatcccttgggtcgtcaatatctgcaactacctcatctgtaacttcatcaattataacagtgccagtatactctgtagtcaatgttttgccagaaccagcattaaagaaacttccagactctaattcatttacaaaatcagcagcagccttgctgtcacccattaaaacattgactacggagacacatcctcagcctcacttcagtcgaacttcatctccagttaagtcatctttgttccttgcaccctctgcccttaagttgtctacaccatcttctttatcttccagtcaggagatactaaaagatgtagctgaaatgaaagaggacctaatgcggatgaccgcaatactacagacagatgtgcctgaggagaagccattccaacctgaactcccaaaggaagggagaatagatgatgaagaacctttcaaaattgtagagaaagtaaaggaagacttagtgaaagttagtgaaatccttaaaaaggatgtatgtgtagataataaaggatcacccaaatcaccaaagagtgacaaaggacactctcctgaagatgactggatagaatttagttcggaagaaatccgggaagccagacaacaagctgctgcgagccagtctccatctctgccagagagagtgcaagtaaaagcaaaagccgcctccgaaaaggattataacttgaccaaagttattgattacctaacaaatgatattgggagtagttcactgacaaacttaaaatacaagtttgaggatgcaaagaaggatggtgaggagagacagaaaagagttttaaaaccagcaattgctttgcaggaacacaaactcaaaatgcctccagcctccatgaggacttccacctctgagaaagaattgtgtaaaatggctgattccttttttggaacagatactattttagagtctcctgatgacttttctcaacacgaccaagataaaagtcccttgtctgacagtggctttgaaacaagaagtgaaaagacaccttcagccccacaaagcgctgaaagcactggtcctaaaccactttttcatgaagttcccatccctcctgtcattacagaaacaagaactgaagtggttcatgttatcaggagctatgatccctcagctggggatgttccccagacccaaccagaggagcctgtgtcacctaaaccttcacctacttttatggaattggaaccaaagcccaccacctctagtattaaagaaaaggttaaagcatttcaaatgaaagccagtagtgaagaagatgaccacaatcgggttttaagcaaaggcatgcgtgttaaagaagagactcacataaccacaaccaccagaatggtttatcattctccaccaggcggtgaaggtgcatctgaaagaattgaagaaaccatgtcagtccatgacatcatgaaggcctttcagtccgggcgggatccttccaaagaactggcaggtctgtttgaacataagtcggcagtgtctccagatgttcacaagtctgctgctgaaacctcagcccagcatgcagagaaggacaaccaaatgaaacccaaactggagcgtataatagaagtccacatcgaaaaaggtaaccaagctgagcccactgaagtcattattagagaaaccaaaaagcatccagaaaaagaaatgtatgtatatcagaaagacttatcccggggagatattaacctaaaagattttctgccagaaaaacacgatgcttttccttgttcagaggaacagggtcagcaagaagaagaagaacttactgctgaagagtcattgccttcttatctggagtcttccagagtaaacactcctgtgtcccaagaagaagatagccgccctagttctgctcaactcatatctgatgactcttataaaacattgaagcttttgagtcaacactcaatagaataccatgacgatgagttgtcagaactaagaggggagtcttacaggtttgctgagaaaatgcttctgtcagaaaagctagatgtgtctcattctgatactgaggaatcggttacagaccatgcaggaccccctagctcagagttacaggggtctgataagcggtccagagaaaaaatagccactgcccccaaaaaagaaattctctccaaaatctataaagatgtttctgaaaatggtgtaggtaaagtgtctaaagatgagcattttgataaagtgacagtgttgcactattctggcaatgttagtagtccaaaacatgccatgtggatgcgctttactgaggacagattagacagaggtagagagaagttgatatatgaagatagggtggacaggactgtgaaggaggctgaagaaaaactgactgaagtgtcacagttttttcgtgacaaaactgaaaagctaaatgatgaactgcagtccccagagaaaaaggcacgccctaaaaatggcaaagaatattcttctcaaagccctaccagtagcagccctgagaaagtgctactgacagaactgctggcatccaatgatgagtgggttaaggcaagacagcatggccctgatggacaaggcttccccaaggccgaggagaaggcacccagtctgcccagcagcccagagaagatggttctctcccaacagactgaggacagcaagtccacagtggaagccaaaggaagtatttcacagagcaaagcaccagatgggccccagtctggattccagctcaaacaatctaaactcagttccattagattaaaatttgaacaaggcacacacgcaaaaagtaaggacatgtctcaagaagacagaaagtcagatggccagtccagaatcccagttaaaaaaatacaggagagcaagctacccgtctaccaagtttttgctagagaaaaacagcagaaggccatagacctcccagatgaaagtgtatctgtgcaaaaagattttatggtattaaaaaccaaagatgagcatgcccaaagcaacgaaattgttgtaaatgattctggctctgataatgtgaaaaaacagagaactgaaatgtcaagtaaagcaatgcctgactctttttctgagcagcaggctaaagacttggcatgtcatataacctcagatttagcaactaggggaccatgggacaaaaaggtctttagaacatgggagagttcgggagccactaacaataagtctcagaaagaaaaactttcgcatgtacttgttcatgatgtaagagagaatcacattggtcaccctgagagtaaaagtgttgatcaaaagaatgaatttatgtctgtgactgagagagaacgcaaattgttaacaaacggctctctctcagaaattaaagaaatgactgtaaaatctccctccaaaaaagtcttatatagggaatatgttgtgaaagaaggggaccatccaggcggattgcttgatcagccttccaggaggagcgagagctcagcagtgtcacacattcccgtcagagttgctgatgagaggagaatgctgtcttctaatattcccgatggtttttgtgaacagtcggcatttccaaaacatgaactatcacaaaaattgtcccagtcaagcatgagtaaagagacagttgagacacagcactttaattctatagaagatgaaaaagttacctattcagaaatcagcaaagtttccaaacaccagagttatgtaggtttatgcccacctctcgaggaaaccgaaacctcccccaccaaatctcctgattctttagagtttagcccaggaaaggaatctccctctagtgatgtattcgaccacagtcccattgatggattggaaaaactcgcaccactagcccagacagagggagggaaagagataaaaactttacccgtttatgtcagttttgtacaagtggggaagcaatatgaaaaggagatacaacaaggaggtgtaaaaaaaatcataagtcaggaatgtaagacagtacaagaaaccagggggaccttttatacaactagacagcaaaagcaacctccttctccccaaggtagtccagaagatgatactctagagcaagtatcctttctagacagctctgggaaaagccctttaaccccagaaacacccagttcagaggaagtgagttatgaatttacatctaagacacctgactcgctcatagcttatataccaggcaaacccagcccaattcccgaggtttctgaggagtcagaggaggaggaacaggccaagtcaacctcccttaagcagactacagtggaggaaacagcagttgagcgtgaaatgcctaatgacgtgagcaaagactctaaccaaagacccaaaaataacagagttgcctatattgaatttccccctcctccaccactggatgcggaccagattgagtcagataagaagcatcattatctcccagaaaaagaggttgacatgattgaagtcaatctgcaagatgagcatgacaagtaccagctggctgaacctgtcattagagtgcagccaccttcaccagttcctcccggggcagacgtcagtgattcaagcgatgacgaatctatttatcagccagtcccagttaaaaaatataccttcaaattaaaggaagtggacgatgaacaaaaagaaaaacccaaagcttctgctgaaaaggcttccaaccagaaagaactggaaagtaatggatctggaaaagataatgaatttggccttggccttgattcacctcagaatgaaattgcccagaatgggaacaacgaccagtccatcacagagtgttccattgccaccacagcagagttttctcatgacacggatgccacagagatcgactctctggatggctatgacctgcaagatgaagatgatggcttgacagagagtgattctaaactcccaattcaagccatggaaattaagaaagatatctggaacacagagggcattctgaagccagctgaccgctcttttagccaaagtaaacttgaagttatcgaggaggagggaaaggtgggaccagatgaggacaagccaccttctaaaagttcttcatctgaaaagactcctgataagactgatcagaagtcaggggcccagttcttcacactggaaggcagacatcctgacagatcagtgtttcctgatacttacttcagttacaaagtagatgaagaatttgccactccttttaaaacagtagctaccaaaggtctagattttgacccttggtctaataaccgaggggatgatgaagtttttgacagtaaatcacgggaagatgaaactaagccatttgggctggcggtagaagaccgctctccagcaacaacccctgatacaacgccagccagaacgccaactgatgaaagtaccccaactagtgagcctaaccccttcccatttcatgaaggaaaaatgtttgagatgactcgcagtggtgcaattgacatgagcaagagggattttgttgaagagaggctccaatttttccagattggtgagcatacttctgaagggaagtcaggggaccagggggaaggggataaaagtatggtcactgccacaccacagccacagtcaggggacaccactgtagaaaccaatctagagagaaatgtagagacacctacagtggaacctaaccccagcatcccgaccagcggagagtgtcaggaaggcacatccagtagtggctccctggagaaatcagcagcagccactaacacctctaaagttgaccccaagttgcgcacgcctataaaaatgggaatttctgcatccaccatgaccatgaagaaagaaggccctggagaaataacagataagatagaagcggtgatgaccagttgtcagggattagaaaatgaaactataacaatgatttcaaatacagccaatagccagatgggcgttaggccccatgaaaaacatgattttcaaaaagataactttaataacaacaacaatttggattcttccactatacagacagataacattatgagtaatatagttctgacagaacattctgcacccacttgtaccacagagaaagataacccagtgaaagtctcatcaggaaaaaagacaggggtactacaaggacactgtgtaagagataagcagaaagttcttggagaacagcaaaaaacaaaggaattgatagggattaggcaaaaatccaaacttcccataaaggccacttcaccaaaagataccttcccaccgaaccatatgtcaaacactaaagcaagtaaaatgaagcaggttagtcaatccgagaaaaccaaagcccttactacttcttcatgtgtagatgtaaagtccagaattccagtgaaaaacacacacagggataacataattgcagttagaaaagcatgtgccacacaaaagcaagggcagccagagaaaggcaaggccaaacagcttccatccaagttgccagtaaaggtaagatccacctgtgtcactaccaccaccaccactgccaccaccaccaccactaccaccactaccaccaccaccagctgcacagttaaagttaggaaaagtcagctcaaggaagtatgtaaacattccattgaatattttaagggaattagtggtgagaccttaaagcttgtggaccgcctctctgaagaagaaaaaaagatgcagtccgagttgtccgatgaggaagaaagtacctcaagaaacacgtcgttgtccgagacttcccggggtggccagccttcggttacaacgaagtctgctagagataagaaaacagaggcagcacctttaaaatcaaagagtgaaaaggccggcagtgagaaaaggagcagtagaaggactggtgagaatgaaggcagtcaggtctctcgagcactctgctcacatcctggagaacgagcatagtttgtaaacactttccaactcgtagaccctagtgcatgaactgttgtgattgcctgtggagtgacttaaccgtagtttctcattatgtcattgtcatctgtatgtgctgtcgtatatactcttctttctgccttttgatcaaactacacggtagacagctagggaagcatgctgaagatattggtgtcattcaagatgaacaaccttcttttttcttttttaatgtgctaatggatatgattctgtcaaagtaaaagcacagatgttgaaatcccatcatggtgttttcaccaacacgacacttctgtaactgtttaaactagctagctcgtcagcatgttcaatcccattacattgagcatccatgtagtctgacatttggcctgatgcaggtgaaaaacaagtgagccatgtgcaaagaagtgttcatgtaggtgactaggacacatttcagtgtacagtgttagcattagtctctctgtaaaatctgcgtactgctaaaagcaattttccagtatcgtatctttcttgatgattattttaattaagaaattgtaaatcgtaggtccacagagtccatgtgaacggacagatatcaggatggcaatagtagccgatcacctgggacttagttggacaggtaagtgcatacactcctgaatggaacaaattagtttcttcatttctttgtcttactcacaagcagttcaatatatatattttaaaaatagaaacaagcagctagtaaaaaacatttttatcaccaataattttatctacccagagataaatactgattgtaccttgtatactgtgtttttccaaagccttttctatgcatatgcactaagaaatagaaatttaaatttattttaccttaaatttaagcattttcttcacaatgtcacttctgtaatataggttaaccttctactgaatagcaaatttatcttgtagcacaaaagaaaacacagctaaggcctatgacttaattaatcaaaattctttcacatggtttatgtccttagggcagttttctaggcaacagttcaattaacccacgcctaggctgcacaaattttagtcattcactgtgaacttctcttcacattttgtacgatatacacataaaactctatgtttatttatctgatactcttctttaagtaaactcacttttctgcccaaatatttatttaaaagaaaaatcttatatcacttcgataatgggaaaggattatttgcattatctatgtaaacaagaaaacaatgacagtaagtttaaattttgaattaaaaatttttaaatgtgatttttaaaatatgataaacatgtaaataaatatatttaattcacaaaagttgaattctataaaattcatgcctgtaatcccagtactgtggggaggccaaggcaggtagatcacttaatgtcaggactagcctacccaacatggtgaaaccctgtctctactaaaaatacaaaaattagccaggtgtggtggtgcatgcctgtcgtcctggctacttgggaggctgagacaggagaatcgcttgaacccgggaggcagaggctgcagtgagctgagattgcaccactgcactccagtctgggtaatagcgtgagactccatctcaataaaacaaaataaaataaaagatgatgagatttcatatcaattggacaaattggacaattctgcattgtaattttgagcttaacaggacccttaaaatcctacctcacatgaatctgagaaattttaagttttataggttaagtgtattttttaatgcatggccaaataataaatattcattatcatcacatctaaattcatcctgcataccattagcaacatacattccatacagttatctctatttaatgggagaatatgaaactagataataggaagcagtttcatctaattttttttttcctttgaatgccctcagtccccgtccacccccaccaccactaccccatttcaaaccctcctctcttcatcaacctagtctctgctctcaggtatactgctaatggttgggagctgagtggagttctgaaaagatagataggtggtctgaataatgttttgtaggcagttgagagttaacagtaatttattatgtatacatatttactaatatcaactttatattttaacattggacattgtaatctgaaaatatactggagcaaatgtttgttttgcattattatatgcctagaactgttagattattttccttaagcaaatacagtcagagtaaatttttggagatgtggcttaatagccagacgaaaagccataaacctaaaattcctagtgtcagtgtctttgctctttattaagtctctagacaatggatacagttttgtcatgaaggcttattgggcagtaggagtattgtctcttaagacacagagatgaagaacttaaaataattaacttctctaactagaattactgtatgctcaatgataattattaagaatattaagcatttaagagaacaaaatttatatctgtccctcgaaaccactattaacatcttatgtgctttttttaaaacaagaacgttttataatgttatacatacaatgtaatctgcttatttgtaactgtgtcattctacaaaattaaatattttctgatcttggttttaatgcataaaaaaatatccaatagatgtaccttatgatggtggttttctaactgtggttcacaatgcttcaatgagatgtgaaatcagttcatactttgtttttgtttttaaatggaatattatataaaagaaaatgactgtgtttaagtgtattaaggctaaattctgttccggggagatctgattttatttatgtaaacaccatgatatataatgtatttctaactgtaggccatgatcacaacagttgtttgcaagccactgccttaaattaactcttatccttttgttcaacatgcagattgttttcaatgaacattcatgtatataaatcattgtatataactcatatattgtcagggtaaatttctaaatgtgaatcacttggtcaaaagataatggacttttttgagcctctgaatgcattttgcaaaattgctggaagtattttgtaagggggatagagtcttgaccaattccttttccatgggatcatttttgcccatttcttactttttgttatcatttaaggtaatacacacttgataaattgttttaatataaaaaaatacagtgggaactaagtctccttcccttctctgactcctaagtttccctcttccaaggcagccactaatagtgagatcatatgtatctttccaaagacactctgcaatttacaagattgaatatgagtatatctgagtgtatacgagtagatggacagaaagctgtctcccttttattttttactcaagtagcttcatatcatataagatgatctggcctggagtcatcatataacctcctgtgtggagtttatgaaacttgaaggcatagagggtggcatattatgtgagtaaaagataccttcatgaagattgcttagcacaaaccctatcagcatctcttgtgccatatacatgaattgtatacctctacgtatcttgtaatttgctcaaattatagagaatttggctgaattaaaacaatcatccaacatcctctttgcaaactccaaaaatcttgttttattttttgagatagggtctcgctctattgcccaggctgaagtgcagtggcacaatctcagctcactgcaccccctgcctcctgggctcaagtgatccaactcagcctcctgagtagctgggaccacaggcatgtgccaccacacctggataatttttgtgttgttgttgttgttgttgttgttgttgttgttgttgctgtgtgtatggagaccggggttttgccatgttgcccaggctggtctcaaatcctgggtgcaagcaatccacctgcctcagcctcctgaagtgctgggattataggtatgggccactgtgcccagcctaagtctaaaaatctttataagatggtctctaaaaaaaatctgattgtaagtcattacctaaggagagttaagtcacagcctgtgtatggtcactactttgctatgaagccaagtatataaaaattaattcctgaggctgtacttgagcttgactataaaattcccttttctttttgtggcaattgagcattacttttatgaaacgtgtgataaaagtagaatatgcaatcttagtaactctctttcttttctacagaactggcaagggaactgaatttttcagtggatgaaatcaatcaaatacgtgtggaaaatccaaattctttaatttctcagagcttcatgttattaaaaaaatgggttaccagagacggaaaaaatgccacaagtatgccgaaattatattattttaactttcaaaactgcataaatgtaatattttagataagccaactgttaggttcatccaagtagtgttgtaattttctgtaatctttaatatagaaaactaagtgatcatgaggtaatagcaagtcttttgaagttatacttgtttaatttagtgttaacagtctaaacttctattcttcagaagctttttggaaagcaagtagcagggaatttttcgcatctggcctgacattctctctgtgaccataaaaactgaaaacataattttagttgttaaatcatgggacacagtcatcagaaacactccgaagttaccactatggctggaggtggatgtgcagagagggaagacaggatcatattaggggagcaaatagttttattcagcttggttggctctactgttgttgggtttggttttgttggctggtgggattgggtggtagtcctatattttggcaagtgccaacccacaacaatgtggaataaattattatgggtttgcctgtgtcaacttgaccctagaaagtcattaaaatgctaagtaccaaatatgagggtgacctattttgacattctaagaggaaaggaaactttagttttattagatccccttatagccaacaggaatctagttattttaaggcccatccgcactgttccagtggaacacagctttacaaagtgatgattaagactctgacaccttccctgtagcagcgagcattctgagtcctctggatagggagattgcagagatggagtaagaaggagctaaaatgtcagcagggctgcaaaagccatgcctttgtgtagatattgtgctgactgaaagaacataatttaattgggttttcaacctttttttctccttttcagctgatgccttaacttcggtcttgacaaaaattaatcgaatagatatagtgacactgctagaaggaccaatatttgattatggaaatatttcaggcaccagaagttttgcagatgagaacaatgttttccatgaccctgttgatggtaatcgaatttagtgttcatatttatttaatcatttgataaaatttgaaagtgcagtcagacaaggcagtcacttaaaagcaactaaactgtgatttgcttgacttagtttctcattttctctgccagagtctgcaaataaacactctgatatcagagcaaacttggtaaatacctctgtttatatacaatataaatatacaatataaatcatgacgtatgaacgcctaaggtatctgaaagagttggtatttctaatatttcataaaagttaaatatctagagaatgcattgcttttgtcacttttaatttttatattaaccctcctaaactagttacctcttttattcgtatataggtaaaacaaacgatgagccatttttatcaaataagcaaggtattgagtaaagtgtaagcatatagtatacaaattgtaaggtaaaatggcaatttactgtgtggcaccaggtatttaaatgtgcactgaaaaaatttaatgtatcattcaagtatgtgctttagttatttagcgttcgttgttattttaacttcatgaatatgctgccatttattctttggaaaaactgcttgatctattgtatatcaaaggcagcataatttctaattcagtcggcatacatgttactaacaacaattcctctttcacattagcttaatttatataatgatcttgtcattttttcctcattatgtaaattgtgctttcttcactgaaatattaagaaaaacataataaatatcttcctatgtttttcaaaatagtcctgtcttaggctcacaaatgaaaatttattcctacaatgaatttttgttctgtttttgagacgaagtctcgctctgtcgcctaagctggagtgcaatggcacgatctcggctcactgcaacctctgcctcctgggttcaagccattctcctgtctcagcctcctgagtagctgggattacaggcatgcaccaccgtgcccagcaaattttttgtatttttagtaaagatgggggtttcaccacgttggccaggctggtctcgaactcttgacctcaagtgatccacccacctctgcctcccaaagtgctggaattacaggcatgagccaccccacccagcctctataatgaattttgagtagaaaatttgatgatggtgtggaggcaggaataagaactaaggatatttttctagtattccatttttaaactggcaaagttagattaacaagagtcacaaacttctaattaacttctaattctgcatatattttgtggaaaaaatcttaaaattcttagaaagttcctgcttattaaaaagtttaagtctggccaagcactgtctgtctcttaaaaaaaaaaaaagtttaagtcaacaaaagatttaaagcatacttgttatacatgtaacaaacacaatgggtaatgaagtaaaaagcggttctttttaagtttataaagaccatagaaccttggaaaaacgctccctttgaggccttgtcttatatgcaaggccatatattagtaaccacatgctttttgcactagataaatatagatcatcttatcaaattttaaattattgataagttatagtttatacattcttctaatattctttattggaaaaaatagttgttaagtaactctaataaaaaagatcaccagaacacaacagaagtagttgtgttgaaagcttcatttaatttgaacattttaaaattggaatatccttaaaatacagtcaaaaatgaaatggctttttgttgctgtatcttaatatttttaaattcctttttcaaaatttcttagggaaatttagaaacatgtatatgaagtaatttcacttaggcagattataaacctcagctaatcttagccagcttttcaacaagagtctggtttatagatgaccataactgaaaaatgttcacttacctatagcaatttgagtttacaacagcagctaagttggtatttacctgggactgatggaaaaattagacttttattttgtagaccaacaattcagaaactgtggtttgttgcttttttcctgtctctcctcttcgttgaacttttatgaaacttcctttcctcaccatgaccagaccattgttgacttttctctctgctgaggcagaaaaatgcttccatagtccatgcagcaatgtttaaaacaagggattcgttcccccctccccttttgtgtaggctggttaataaactctatgtttcatagcattgtcgtgaatattcagagtgctccctgcgaatggttttcctactatctctgttgtgtatcatttctgtttatttgattcgtggttctgagtggaccctaccactgacttcaccaagaccttcatgtactccacaaccctttcatcttggtcatatctgtttttgtacaacaccctaaaactacatggagtcttttaaacttggtctgttttttcaatccttttcttaacatcgtttaaaatttttttcccagtgccactgctctaaaatctaacaaacaatcatttctttccaaagattaaatccgtttttctgtgctataatttcatgtgaaagaagaactaggttgctttgctcatatgtacagttcttaaaataagttgtaggtaattaatataaaagttgtaggtaattaatgataaaaattggtttcttgtggcttgctgtattcagtccaccacagtatgaacttcgcatgctaaatatagaaagataataagtatctcatgtaatgacaactaactttatattggtctttatataaacttaaatatataaactttatatatttagtctgcatactttggattagtgtgcatatttacttattgtatcataatttccaaaacagaaacaattgatatcttaattagtattctattttattggagtttgcactaggctttttatttcattgtgttacatttaattgaactaaaccgataaatttattgacattaatctgtaattcatcatacatttttcatgcctgatataattttagtcattccatgtgtttttgtttgatgtattctaattcattccagtcagtccaaatgtactgtcttccataggttatccttcccttcaagtggaactggaaacccccacagggttgcactacacaccacctacccctttccagcaagatgattattttagtgatatctctagcatagaatctccccttagaacccctagtagactgagtgatgggctagtgccttcccaggggaacatagagcattccgcagatggacctccagtcgtaactgcagaagacgcttccttagaagacagcaaactggaagactcagtgcctttaacagaaatgcctgaagcagtggatgtagatgagagccagttggagaatgtatgtctgagtgagtatcctcaataccttggaaatttggctgggtccccaaaagatgttaaaccagcagagcctagaaaactaggagtaagctctgagcagcaggagaaaggaaaatctggtcctgatgaggagatgatggaagagaaactcaaatctctatttgaggacattcaacttgaagaaggagtagagtctgaggagatgacagaagaaaaagtacaggctattcttaagcgtgttcagcaagcagaactggaaatgtcttcaattacaggttggcagaatgagacatcaagtggaaacctagagtcctgcgctcaagctcgaagagtaactggtgggttactagatcgactggatgacaggtatggctgtttcaaaaaaaggaaagtgaacacaggttacttgttaatagtttatcttaaatacatgctttttagtggtgacttcttctaaattaccattctagttctgggataaaacctgctttaaagaccagttcattatgctaatctggaaaggaaagtgaatttaaatttaaatttaattctcaaaactgttgaaataaaatacaagaaaatttacatacatgcccaagatttatacgttgtctttactttagaatactattcttttctactttattacttgtatgattcttttcatatagccagtaattattgttcctttaaaataatgaggtgggtggatcacctgaggtcaggagttcaagaccagcctggccaacatggtgaaacctcatctttactaaaaatacaaaaatcagctgggtgtggtgtcacgcacctgtaatcccagctactcaggaggctgaggcaggagaactgcttgaacacatgagggtggaggttgcagtgagctgagatcacaccactgcactccagcctgggtgacagagtgagactctgtctcaaaaacataagaagaataatgaatgaaagtccatgttatttagaaatataaacattactgtttttttcctaactgcaaacataaatatgctcattattaaaacttaaaatgcagattaaacaaatcaatacaccccatcatctaccaataacattttggtggattttcttctacgcatgattttttaaatgtcttaatgtaaaaagtgcagagtagcaaaaagaaaagccatccattctcctaccatactaggaaaaactgattttacatatccttctatttttccacgagtcttatttttcataatttgaaagatacacagttttttacaccaaataatattgccatgatgaacatttgtctttacccaaaataatttcctggtcacatttgtctttacccaaaataatttcctggtcatgaatttggttaattcttatactggccttgctctagaaaggtgaaagtctagaatctgagacatagtttcaaatcccaccaccattaggaatgtagtttgtgatttgggatgaatctctaagctctaagaatgtcactctaattatctttaaatataagaatactactaccttccttaaacagatttatagatagaaaaagagaggatgtatcatgtctaccaaatgactgacacaaatagtaatttctcagtagcactaggcattatttttatttacatacacattagactaaaatatattttacttcagtgccagctagtgattaaattggacacaagagaacttatttcataaccatattttatatttttatgtcattaataagcttcttgctcaataaaaattcccaaagagggagtttacaaaactacttttgaaaaattgcaggcatgaatgaactttatctacagcctacaaaagagacagttgcaaagaagacaaacagtactaattttgatgtctatgttcagatatagtcacacaatttatagttacatatcagggaatagatataggaaaggtgttcatcattattaaaccgctgaaattccttgttttatataggctctgccagtgaattatatagaaaaaacactagtgaatcccctggttccatagaaggaggaaaatgccagtcactttgctcctgttatcagaatatgcagggtaggagaacgccggcaagcaatgtggactggggaatagaaaattaaaccaaagtcataaagctatatgttacaggatcttcacagtatgcttggattgtttatccttacacataaagaatagagtgtgctatggatgtcttttaaaaataagtatgttcagataatcagaatctgatttaaaggaatacacacacatatataagtatatattatacatataaagcattgtactagttattgccttctagcggtaataaacaaagatgctcaaaataatacgcaagctacaaaaaaagtgaaaaatagtctatactgaaacttgtaaaaaacttagaagtcaatttaaaagaaagcattggaaaggaaagagttttaatagttaagggaaaaacagttctctcagtaggtagaaaagggtgtgcaaccctcaaatcactagtgagattagcagaggtcaagagtagagaaaaatgagattcaagtaaaggtattagagttggaaaagtaacggcaggattcatgactgaaaacatatacaaagaattggaatttggggtacttgggggaataccacagtcttgaccacaggaatttgttttgttcttttttggagacagggcgcaattttttgtacagtagctcaatccttgctcactgcaacctctgcctcccaggctcaagcgatcctcccacctcagcctcccaagtagctgggactacaggcatgcaccactgtgcccactaatttttgtagttttttggtagagacatggttttaccacatcacccaggccgaactcaaattcctgggctcaagggatccttctgcctcagcctcccaaaatgctgggaatataggcaagaaccactgagtccggccagcagtttattttttactggtgatagagaagcgttctgaaatctcttctcctttaagattggtgggcttggaactctaggtatgtccatgagcctttcaggatcactcatcaagatgatagaattcaagtagctgtagaactgcagtttgtttatttagacgagagcatagctaggcaatttggcaactgagatatgggggatgtctagaagctgtgtagcacctcctgacaccgcacccatgagagccctttacattttatttatttattttgagacagagtctcactctgtcacccaggctgaaatacagtggcacaatctcagctcactgcaacctccacctcccgggttcaagcaatcctcctgcctcaggttcctgagtagctgggattacaggcacgtgccatcacgcctggctaattttagtatttttagtagagatggggttttgccacgttggccaggctggtctcgaactcctgacctcaggtgatctcccgcctcagcctcccaaggtgctgggattacaggcatgagccactgcgcccagctacattttaaatccagtggccacacttttcacacttttctattttatgccttcagaagtaggcaaaagacacagttcttaaaactttagagtttctgcaacctatattcagtcatagtttgccattgtgaatttgcaaattttctgttgcagccctgaccagtgtagagattccattacctcatatctcaaaggagaagctggcaaatttgaagcaaatggaagccatacagaaatcactccagaagcaaagacaaaatcttactttccagaatcccaaaatgatgtaggaaaacagagtaccaaggaaactctgaaaccaaaaatacatggatctggtcatgttgaagaaccagcatcaccactagcagcatatcagaaatctctagaagaaaccagcaagcttataatagaagagactaaaccctgtgtgcctgtcagtatgaaaaagatgagtaggacttctccagcagatggcaagccaaggcttagcctccatgaagaagaggggtccagtgggtctgagcaaaaggtacgtcatctggtcatccggtagcagtcattgaaatggaaagtatcggtgctttacttctttggattgatcttgcagccgggggcccaaggttttttacgatttctaaattataaatgtgtgaaattgtagcactaatggtggaggtaaagaaagtactgagttaaacacataggtaaaaaaaaaagttccaagtaaaatgtatgccatttcgttataccttcattcatggtgcaggaaaagggaataagtatctgtttagccatttttaggagggacaagaaccagagagacgttaagtaactagtttaagacccagtattttatctgggatttaggtttcctaactcccactccgtgttcttccttatgggaggaggataatcattctgatcctttctggctccttggcataaacagtctatagcatctgacccatctaagttctgttctgtatggtctgttgtctgaaagcgtgttttaaaaattaaagagatgaaattccaagcctaaaatgaggtgagttgacagcagttagttagaaatttaaaattagaagtataatttttataatttatataagttgatgatgattgtcttaacatgtatttctaatcactttaaaacctcactgtgatagatttgcttgttctttgtacttttgtggtacaatctaatagatttttttctttgaggtttactctatttttagatattaaaagtattttaaactgaaatgatgactcatacgtggatataagaaaataaaaagcagctctgtttcctacattttttactgctttttactctcccaatttttatgtcttttcatcaattctgcaatagacagagattaatagtagcacttgcagttttcgctgagacatatccagttcactgaagacccactttagtgttttgggaggaaaaaacaagtcttttctgaaataatgagttcaagattgatttgaggtttaggaagacttttagcaaactcaatcgctcaggagctgattctcagcttatcagtaatcacatcctttcctattcccttctgcagacaatatctgactattttcaggcttgttagaagggagagtaagaggaagtttagttctagatcatctatttttttttccctgtaagtaagttgctttgatataagatttggtggtggtaatcagttgcttaaatgatatcctaaaataatctccagctcatttaataactgccttcactaaatttttattaatggttttgttttagttttaagctcttttaagtctttttcaggccttctttaactccgtcctgacaagtgtggttttgaatactgatttctgtctttgacttgacttttagtatatttaagtggtgtgagttttggataagtttccttttaaaatgatcccacaaaatatagagagaagcaataacatagtggtatttttcctgtgaatatttattctgcaaaagcctgttaaagttctaaaggcaaatttctatacaaacacatataaacaccgctgtgtgtgtacatgtgcatatgtatgggccactggaaaatcatattggccattggcataaagacggttgaaaatttagttttaaaccttgagtggaaacttagctgagtttgtcagtaatggaaaataatttaccattagaaaacattttcaggatttcttgtaaatgagtttgtgcctctgatattggtttcgagtcctattataatgcagaaagacttcatgacctaaaaaatccataatggagttaaagcttctaggagacatgaacctgacctcacaagaaaaccaaagatgtttaggatgtatcgtttgtggctataccatagtataatagcaaccaactaggtcatctgatgtatgatctcagaaaacagccccctttttatcccctaaaaaatcaggtcaaaagtccgggtgcggctcctacacggatgactgcctgctgttataaggtaaaattctgctattttccacctgtttccatgcagcaacccatggcaaagagtactgagaaaattccatttggtttccttgttttcccctttaccaattcctagataattcactaaaaggaatcctgagcctgagattcttcctccattttcactttaaggttagcagagattccagggaaaaagtggaaactgaaacaatgaccaaatggccactttttctttatgtaaggggttggcctcacatgatttttttgtaggattatgctataatcacctctaggtttgttgtttgtgtttgctttaacatagatgctcttctacttttgaattcacccaagtgaaaacctttcctcaacttatgattccatgtacagataattcagattcagttttcccttttgcctcatccaacccattaatcctggaatgctaataattcttttctttcgtcaacacagattccttttacctctttctgacttcttgagcctttgcaaagcttccttccacaatacttaaatcattctaagtctcctaaatttactgtcctttactgaaaaatttaaaataataatagcaaacttagttcaagttcttactccttgtaaggatagtggctatgattttcttttaaaaccatattattcagtggggtggtttgttgaggtgaaatttcctgtaaagtcaaggctgatagtactgtttaacattttaaaatacttgtcaagtttactgttgatgaaaaagatggcctagtttattatctatacaactaacatttcataaagcattttatctaacacctgtacctcctatagcagttttatttttttttttaaacaaatactggaattcatttttccagcggatgttaactaaattctgtctctgggactattagatttgaggtaatgaattaacttcaaagataaagtaccagaattattttcatagttccaccattaaaatttagaaatttaaccactcagtaaatactcttccccatggcatctaagtgaaagctaaagatattttccccttcaaattatgaactatttgccccttggtagtttttccagattcccacctttattgcctaaaaattaatattttgtgcagcaactatattcttgtctgtgaaaggtattctattttatattctaatttcattatcagttctttaaaaaaagatttcaagctttcatacatttattccttcattaaattctttctcagtaccagttatgtgttaggtacaaattatgctgatattaatctcttgaatataaatatatgtgccaaaatatgctaatataaattctttacttgttgttgttgttgttgttgagacggagtcttgccctattgcccaggctggagtgcagtggcgcgatttcagctcactgcaacctctgcctcccaggttcaagcaattctcctgcctcagcctcctaaggagctattttttgtattttagtagagacagggtttcaccgtgttggtcaggctggtctcgaactcctgacctcaagtgatccacccgccttggcctcccaaagtgctgggattacaggtgtgagccaccgtgcccagctagattctttactttttaataaagttcaaaatagcttttaataaggttgtcaaatttgaccaaaatttcatagaagtccaaaatattatgcctctttctgtagatcaaatgaaatatggcccaatttacaagggtatacaccttcatggtagatgaatatagattttaaactagttttaaaaggaatatgaatgatttaattgtagtttctgctgccaaaaagtctccataattattttttaataacttataactaccttgatctttacctgtacacacacacacacacacacatgcacagagtaatttcacttagaatcctggtcaaaaattttcttccacttaaattttttttaagactctcacaaatatacatcatggttttctttagtcggcaaaaaaaaaaaaaaaaaaagaagaaaacatcaagtaagtgtaattctttcttgatttcccttctcagaatgtcttttattttaagtgtgatggtaaaattatactaaaaatgcatttgtcaggacttgaaagacagtgagagtgattcaagctcagaggaagagcggagagtcactacccgagttattcgccggcgtttgattataaaggtatcctgtagctggatcattatgtggcattgctctactattagaaactccttccttgtggttgtagaaactccttccttgtggttgtgaaatttcagcatgcttgataatgaaatggctttgtgtaatttttttgcacccttgaaagcttgtaaaaacaacaaccaaaaagaaaagaagccatgttgcatggtattctgtataggcctatttgatatgtggcggttgtagttttatttgagaattcttggcatttgtatcctgctttccttgaagaagtgttatgtgaatgagcaaagattctgtcttggtgacacagtagttcatatcaaatgaaatgtttaattgaaaccttagaaactgtaacaaggtatgaggcacgataaagaagaaagagaatgaaagaattaaaaggcttccttctcagtctcaaattcctactgccttaagaatttttaaattaaaaccagttcttcataagcaatcagtggctgagaatttgaggttataacctggcatggatatatgtgacacaatgcaagtcaagtaaaaaaaaaaaaaaatctgaaataggtgtttgtttaactttactaacacacaagaaaaaaatcaagctgcatttttaagtataggagtcaatttaaaaaaaaaaggaaaatagaattcttccctattacggcacaattgaaaacactattaataaatattctgtctttccttcacaaaggtctgttgaagcacttaccttttgcgtagtaaggttccacagaatgcttcttgtagtctcccccttgtcttcattacttcgtcatcagatctttctaagggttagaataattgagttcagagaactagaaagccattttcaatgcgcagacttttgaatatgatccaaataacttgaggcttcttggttactgccctagagagaaagaggaagagaatatctattgaaaaccatttatcaaacttaaccaatcccaaagtgtcaagagacccaacagaaagcacagaagttggcacaggtgtccaaaatttcttaatcctggtgcttttcacttttcatgaagaaactccaccaaatctgccctaatacagtttttctaagactctggaaacattagggaagaaaataaatcgttgtctaaattttgagttatcctgcaaatcaattgtaagctcaatagggttcctttaaaaaccatgaatcacttctttgaaaattccatgtatataagcaagccaaattacttattgctgtctagcacatttgcaagtatttaacctgctatcaataaaatcctcataatcagtcacctcacacatgttctctgggttggggtgggggaatgcttgattctgtttttctgagtttttgctattctcataatcagtgtcttcaagatatgatattttaaagtgaaaggtctagaaaaagcacatagtgcttcgaacttgtcttttatgcttaacatatcacatactaatgttacatctaaatccaccacattcctttataatagctgcccatgatagaagttgactttcttctatccaggacaaaagaaaacaaatatagccatgcaaaaaaagtggaaggcggggataaagaagtttttctctgagaaaacaaaaacaataacttcaaaacctctcaaatcaataagggctatttcctttggtctcctagaattctagatatgcaccagcaagttagctattaagtaattttcttagagtaagttatctttgtttttcagcttaaaatatgattataacatattaacatatttattaagaacttaggtttaaaagacaaaaatccactataatgttgtaggtttcataaaaacaggggagtccgtattctccccaaatactttttttttgagacagagtcttgctctgtggccaggctggagtgcagtggtgtaatctcggctcactgcaacctccacctccccagttcaagcaattctcctgccccagcctcccaagtagctgagactacaggcgtgcgacaccacacccggctaatttttgtatttttaatagagatggggtttcaccatgttggccatgatggtctcgatctcttgaccttgtgatctgcccaccttggcctcccacagtgctgggattacaggcgtgagccactgcgcccagacccattacttcttgaagttaatgtaattttagagagattgagtgaagtcatcagagaataggttttataactgaggaaggcattgtataaacaataggatcattcacaaacaagctttgagagatatctttcatatgagatggaaaaaccaaaggctaaaaaatagttataatcatcattggaagctataggtataacaaaaacactttataaattatttttctgttcagatttttggggcaattgcaaagagtcacacttctgttgcttttctctttactccatatgttgctatctatctttctaatggaaaagagcttgaggactataatagtatatggtgaatatgacatgggaaccatctcttgtcaaaaacataaaatgggaatgtagtacctaaatgggtcattgagactaaaattactgtgtttccaagatctcagaactgaagattggagataaatttatttactcaaaatcacacagccagacagcagcagctctgggactagaacctaatccctagccctctagtgaagtgctttttcctcaatactatacaattggacctccatatctgggcattccacatgcacaaactcaaccaaccttgagaaaataaaacaataaacagtagaagtaagaagcaatatagtataacaattacttacatagcatttacattatattaggtattataagttatctagaggtgatttaaagtatatgggagaatatgtgtagcttatatgcaaatactgcaccattttatatctgggacttgagcatctgcagattttgctatctgcaggggtcctggaaccaatccctgtggatactaaggaacaagtgtattctcttccagaacaaatgaaaaagtattcctttttgctaggctaaatcaggtatttgaccattcagatcttttcagcagcacagaagagggcagcattgggctgtcattcctgggaaccatttgatggggctggaatgctgggaatttgacttacctcatggatgctgtccaaacctggactgaaccagcatagttaacactgtttgccatagtaagccccctagcacttagtatcccagttctgaaaactagtctggggtggttccatccctcccagagctagctctggctgggaagtatctcccagaggaagcagtatgtatgctaagcattggattgccaaaagtctgggcaaatctgtcttcttagaattccatttgtataataaatgaggtgacggcgatttttctctttactttcaaagtggatccattctttttctatgaagttttaaccttttttttacatttaatgttttcaaactcctatagaatgagtcaagtcaacaaaatctcccatttgtcatgggacttaaatgaatgtgctgataaaattctgatctctatacaatttgataatatacagtggtttcaaatgcttagaagcaatttatgttactaaccagtcgtgagtttaccttattagcttagcaaatccagtaactgcaaaggtaaaaaactgtaaaccaacacacaaccaaactattgtgaaatttcataaaattcaaataactgaatttttactatatagtacaactgtatttttatttcaatttttcaacatttttactggttttctaaataagagcttacatgtatgtttctgctaactcaggcagttcaaacgtatggtaagttctatccgttcattccatttcccagaggtaaccactcttcacaagcttcagattgtttttacatacatatacaaatatgtgtgtaaaatatgtaggtttcgtactattcatattgcttagtatttgctttttgtaaaatatatcgcatcaatcctatttttggacaattcaagttttaacgtatccatcaaagcaaattggtacatttcatattgtcactcttccattttattcaaaaattctaagagaaataaaagttataaaatgcagtgcttctagcaggagtccagagggaagtacagttaattttcattaataccgtcaccagaggtgaaaatgtaacaccacatgtgctataattttcctttataatggttggggggaagggaagggaggttgccagaaatgatgttgtcaacaagaccacggggacaattttgtttacttaaaaatactaagtgttttcaagaactttaaaaacctcattgaggccgggcgcggtggctcaggcctgtaatcccagcactttgggagcccgaggcgggtggatcacgaggtcaggagatcaaaaccatcctggctaacacggtgaaaccccgtctctcctaaaaaatacaaaaaattagccaggcatggtggcgggcgcctgtagtcccagctactcaggaggctgaggcaggagaatggcatgaacccgggaggcggagcttgcagtgagccaagatcgcgccactgcactccagctggggcaacagagcgagactccatctcaaaaaaaaaaaaaaaattgagattactttctcccattgaagagaggccttagagctctctcttaggtaacatttggtctctaatatagttgacagaattaaagatggataaattttttaaaaatgtattttatgactccctgctgtctttcctatctatttaatcaactcctatctaatctattcctcctattcattttggcttattatttataaataggttttgctttttgtaaggctattaatctaagtcaatgaatctaagtcaatgaatacatacttgtatgtattcactatgcttatacatatgcttacttcatagtcctttcagagattgtccaaacaattcaaaaattaactgacatcttttcccacaaaaagattcattcagtacctgcccaataggataccattttagggattttcctgggttctttaattgtctatcactcaaagatgtgtacatttccaaaagttagctcaaaaatatttgtcattcgtgtttaagctataaggaaaactttcattactttttattggctttttttgctgtccttatgactttacttttaaaataaaattttgggttttctccaaacatttgaaaccaccaaccatagaaaatacaaataacactgccattaaaaacgtgttgcaaattttagtgtatttacacaagacctctacatttttccagtttttctcccctctcttcactgcgctgattcaaacttgtcataagcaagattggagatgcactaaacaagatcaagcaacaccttgttttattttcattccacctataccacagtgaggaaaaacaagttaaatgtcccgcccattgtcatgaactatgcacccacaaactgtaagaacacaaagtcactttgtaataagaaaaaaaaaaaatgagaacaaaactttgctagcaaaacaatagtgttctagtctttattctgttattttgaaccagaactgcctttctactgattgtgacatatggtcacatgacatatggcaatcatagaatgttctcaccattggctggcactgaccaaattatcagagccactatcttttccatgccagtaacacaaagagttagaatctcacttttccaggaaggcagctgtttttgtgattggccattttccctaaaacaaaacaaaaccacatctgtacactgccaagcagcattatccatttcaccttttcagtaagaagtttgactgacagatcaataggaccctggaatactagtccatccttaagatctttatccttgttctcccgaactataagtggcacaaatcttaagttaaacacaaatgaaggtaatgtattgcagatatggtcctacttctgctgagtagtttgtcgtgttatacaatcatagagctagtggagagatactatggagccatctaaatccaccaagctgtctatgacaggaaaataggcgcccaccctggagagttaagaatgtattctatttttaaaactcatagtgagacctttcagagtttcccctccaaaattagataacaaatcagaaagccagattctaactctgtattactggaatgtaaaagatagtgactctgataattttgtcaatgccagccaatggtgagcacattctatgactgccatatgttacagccaatagagatgcagcagttctggtttaaaaatgacagaataaagactaaaacactattgttttgttctcatttttttttattacgaaacaactttgtgttcttatagattgtgggtgcatagatcagaagatatcatcttaaattcccttggtattgattttatctatttttttgcctatggcaatgaagatacttcagtgtataaactatgtactatatccgacacaattattctcacttaagagctatgaaagattcagtcttcaagattctctctgtaccctcaacttttctcataatctttcaaaaaatgtgtgtattatctttagtgaatgaatttttaaataaaccagagtgataaatatcatgcccaaactaaggtactatcttagttcaagttagataaaactcaatccacaaaaatctctagagattcggtagaactaatgaagaaacagtgcttaaagtgagacgatctaatcagagctctaatccttggctaaaatttgtctcaacatatgaagcctttcggtttacagtgtgtaactgcatcctataattatgtattttcaaattcttccttctggaatctgttgctaaccatcacgcttatacatacttgaggtttaatgcttgaatgttgttgactgctaaataactgtcagtgaagtcagcctttttcccttgcactggagtagcaagtagaatttacaacttatttctctaaaattccagagcatgtgtgtggtgtttggagtagtgtggagatttctccatctagtatgttgctaatctttatgccacatcctttagggagaggaagcaaaaaacattcctggtgaatctgtcacagaagaacaatttactgatgaagaaggcaacctcatcaccagaaaagtaatcatcattcagatttcatgcttctcttggaatttagattttctgcattaaaaactctgctacttttgtgctgtagtgtcatctcctaaaacagaaaaatctctacttttcaccattacttcctacagatcactcggaaagtattaagacgaattgttatcccacaagagagaaaacgtgatgatgtggtaatggagagggattgccaaagagaatgtagaggacaaaagctttgtgcactccctagaaattgctgctaacaggctggcatctgcagtgtggcagcttgaagtgtttgctgcttttgacatcttatgcatttgatcagggtcaaagaaaaatacttttcttcctaacattctttgttacatactttttttttttaactgtcttcagagttttcacaaagataaggtcatttataggggacagaatgtgccagtttgagggagaaagaagataaaaccttcaccattcaccaccaaacctcagagcagtgcttcagccccacccagggcttggccttcagcagagtgtctgttgggacaggggcggagagcactccaaaagcacaggctttaaaagttagaatggcaaaaggctcagttcaagatctgcacatcggatccatacattttctctttccagtatgttctgcagggaaatctgaattcctccatcttcgtctgaggagggggttcccctctttgggtttataacagcccatttccaatgtgccagttaaagaatccctccagtcaacccctttctctcagagaaaacatctctggttatttttcacttgtttctcagatctctacccttttcaatttaaaaatagaaacttcaatagacaatgtttacattagaaaaagtaaactgaaaatttatcagaagtacaaatcacaaaattgaaaaggcttcatttgttttctgttaaaaattgggtaaaaactgagtatttgtgccacaaccttgctctcggggaactgtattcctgatgctcagtgaagagaggatttgtttatgcaaaatagatgccttcttggtctgacagtaagaggaagtcattggcaattccactaacttaaaaaagtccctcagatcaacagcatttccatggattagtacttaactaagaagtctgaatctcattgcaacagattgtttacaattctgctgccttgtgagctgtggtgctgatttcttttagcttactataggaaatggataggctgctcgttattttgatttatcactaacttactgaattattgtcaagtacaattatgttgtattcattttgacagtgctctctagcttgcttgatgatgctaaactgtgtggttaagctaaagattgtacgtatttttggacatgaagtgacaaaatgctttaaactgtttcgcttgtcctaatccagcctccaaggatcagaatggactgctttataactaacactgtttcactgtgaaatcttaatatgtacactcctttcaaagcagggagaaggttttaaggtgaaaacgaagaaagaaatccggcatgtggaaaagaagagccactcgtaacagcgaacggtcagtcaaggtgaggtgtgttcatatcaacaacagtaggacttaaattcctgtgaaacttatatttttcactaaataagtgattctgattttccccgtcctttccttttcactgaatttcagctttgaaaatcaaatacgaagttgttcaagttctgttgatgtttgcatatatacacacaatgaaacttgacttcggtttcacagtccattaactttctcctcacaaattaggcagcaatttaattgtaaattatgtttgcagaagcaagtataaatagtgataagagtaaaggctcactatgaaatacaatagccttatacaatctaacaggaagactatttggcaacgaatacttcttacagttatactcagagttttattgatccagactttcaccattttagcagaacggcatctgaggatatcattttggttgaaataagtgactttccaagtctaaattaaatgactgacatatctatctggtgttttatagaaacaaaaggaaaaaataggaggttaatggcactgttgtttgttttttaagttaaatgtttagtaagtgagctttgtttacatttgcctggacttttctttacagatcacgttattttccttttacattgtcctatttatttctacttagctacaattaggccatatggggtgaaaaagaaagtcctctatagtctgtaaagtaaagcaaaatcacttcctttagttcaccaccagtcttcttagccccacaggttaaagtagtaagaaagagcaaacagattctagttttcattttcatgcatctgctgttccctgcttgccagaatactggtatgcagagtgctgagggaaggaactgggaagtaatctagtttcactgcctgtaattttatgtgtgagctaactaaggcccaggtaagttctcaattctccctccccgcaagccttatcatttgtttattcagtataacatttacttcatttctttctgtgagactttctcacatgaccatttaatggcattgagaagaccactcagaactgcagagcattctggaaagaatgtttactacacatcctcttcccagtgtttcatgcgtgctcttcaggcaatcctcacagccaaccctcttggataaggccttcatcatccccatttgatagatgaggaaacaggcccaaagtggttaaataaattgcccacgctcacataagtaaaaagtggcagaactaggatacaaacccgaacaagctgcctccagtgtccacttgtttgccagagacttaacctgggtcggaggtgacggggaaggtttccttgagaatatgatgtttgagctgaattttaaagaatgagtagcagtcagtcatccctgtaaggattctgggctgtacccgaaaagcagtgggaaaccactaagggattttaggcaagagtgtggtatgatccagtttatatgttctgcatcactcgctctaaatgcagggtagttgttaatgaattggaaggggcactggtggatgaacagaaaacctgttgagagactattgcagaagctagcttggcagtgaggatggctaaataaaaaaatttcaacacaacttggtttttattggatgagaaggatccaagatgagaaaatgaaggatgacatcaatgtagcagtagctagaatgaacccactcctatgcatgtcctactgctgaacctggtgaaagacttctccctatagcagatccacaaaatactaagcatgagtttgttatcttgaattcgtctatttatgcaattctaagtgaaaaatgaaacgaaagtagaaaagaggtcagtcatctgtagtatgcccctaaagtttagcagcttgttcaatcatattctcaggctcctagtggaaaagaaccaaaagggttacctacaccagctgagccattttctacaatgacatattcctaatacctgtgaataaatgacaccaaaaaatatgacagtgctatgcttccagggtcctttagactgtgttgatttaaaaacagcttgctcactaaatataaagaaagttttaaaattttaaataatcatcctataaagaagttgtcagactcacttgctgcaccactcaaaggagagagaacgttgggtagattcatatgaatgtgaaaataacttcagctaaagcaaacaatgtgtcagattgaaagaacagtgacttgacaagcctaattttactttccaggtagtgtttaccttccgtaagtgaacttagggaatgagtccaagaatactgcctggaattccaggagactgaatgtatgtgctccggaaaaatcaatttgcaaatatattgagagtttttatagtcatgctggctgcctctttaaaaaaaaaaaaagaaaactaagcaagtagaatgctgccaaatatgactgagtcttagatggtaacatcaaaatttgtatttcccattttagaagcagttgaattttgagctatctgaactctgcccctgcttttctttaatattgagtcatagccatcctatttttaaagagaaaagccaatgactttcaagatttgtacatagtatatagtgatttatagtttacaaagtacttttacatttttgtcttatttaatccttccaacaagccttaaggcaagtcaggcaattttgcttgtgaccttttacagatgaggatattaaggctcggacagctcaaatgatgtttctgccttcacacagtttatgactggtatagctaagacttgaagtcaagattattgattctcagcctaatgttctgttacactaagctatctctctaaaattatttacaaagaataataacaatcatcttctgtgaaatgattgctatgtggcaggcactaggtaaataattatatatataaccttaggaaatccccaaaacaatgctataaggtaaatacaactatcccccaaccccttttttaaaaaaatagggaaactgaggttcagaaaacttaaatgatttactcaaggtactacagctagggagcaaaagaataaaatttgaacttatctagaacatagatcttaactactacttatattaataaatagtatttgatcattaaagacccaaaagcaaattctgaatcaaatacaagcacaaaagcaacctgtcgtaaatttcttcttactctacacagtgaaaggactcatagttttttattcttttttcttaaacaaagcaagacttcatttctaaatctctagatttttacttcaaataccaaaaaagggggctgatttgtgaggtcatggcaagggaagatccccagataaaaggtcatttaagccatggcaaagacttgcatgacacatactgtattctaaacctcctctaggaaaatgctcaggttctcacagccatgtgtaagccaagagtggcaagagtgcccatgcttgtcaaggcagccctttacctgaggccaaaaagttaacccatttcatttatttcttcaaagaatatttggccatctgcctggcttaaagtggaaggactagatatacaatagtgaataaatgcttcatggtccctgtctttctggatctcccagtctgcaatgggaaaaagaaatgggacaaatgtttaaacactgaaaatacaaagtccaggatccaatgaaagaatgtaagaatgtacttagactttggggctagggaaggtctctctgaaatcatgacatttaagctaagacctcatcagtggcaccaattatgaaaataatggagaagaagaggaccccaagcaaagggtacaacatgtgcaagcaccctgaggtgggaaaaggcctaacatagttgaagaaatgatagatcagtgcatgatctttcatttcttcaaatatgtaagattggtgtgtgatctttcatttcttcaaatatgttaggtgagctggtggtaggtaagataggcacaagataacattaaaacacacacacacacaccatcattcagagccctgtaggccagaggaaaggatttagatttcattctaaagggaatttaaattccttatagatgctcgatgttagacttttgtcagatacatagtttgcaaatattttctcccattatgtaggttatctctttattctgttgatagtttcttttgctgtgtagaagctccttaattaggtccagtttgtcaatttttgctttttacaagcaaaaaaccacccaccccattaacaagtgggcaaagaacatgaacagacactttttgtttcttcttttatttttgagacagtctcacctgttgcccaggctggagtgcagtagcacaatatcggctcattgcaacctctgcctcctgggttcaagcaattctcatgccccaaccttctgagtaactgggattacaggcacatgctaccatgccccgctaatttttgtatttttagtagagacggggtttcaccatgttggccagggtggtctcaaactcctgacctcaagtgatccactcaccttggcctcccaaagtgcttgaattacgggcgtgagccactgtgcccagccacgcacagacacttttcaaaagaagacaggcatgtggccaacaagcatatgaataaaagttcagcatcactgttcattagagaattgcacattaaaaccacaatgagataccatgtcacaccagtcagaatggctattattaaaaactcaaaaaataacaggtgctggcaaggttgtggagaaaaggaaacatttatacactattggtgggagtgcaaattagttcaaccattatggaaagtggtgtggcaattcctcaaagagctaaaaacagaacgaccgttcaacccagcaatcccattattgggtgtataaaccaaaggaatataaattgttctatcacaaaggcacttgcacatgtatgttcactgcagcactattcacaatagcaaagaatggaatcaacctaaatgcccatcaatggtagactggataaagaaaatgtacacacacatacaccatggaatactatgcaggtataaaaaaaagagtgagagcatgtcctttgcaggaacggaacatagatagagaccattatccttagcaaactaacataggaacagaaaaccaaataccatatgttctcatttagtggaagctaaatgatgagaacacatggacacaaaaagggaaaaaacagacactgggatctacttgagggtgagaggggagaggagaggaaaaagtaactattgggtactaggcttagtacctgggtggcaaaataatgtgtaacaaacctgcacatgtacccttgaacttaataaaataattgtttgtgtgcatgtttagaggaattcgaagcctctgaaggattttaagcaaggacctaacttggtcttttttccctctttaaaaaaaacacaagagcacggactatctagagaatggatagggggacaagaataaaatgaaggtaaccagttaggaacttattgcttcagttcaactaagccataatggtggcttcagctgggaagattgacagcacttgatagattagcatggtgggtagagtggagaagaatcattgagtcaaaaatgactcctagatttctggcataagcaactggatgatagagaaagaagcagaagtggaagaggaatgagttttaagaagaatgacaggcattcaggcttggacttgggtttgaaatgctatgagacatccaagtatttatgttacatatgcaagtccgaagctctgaggaaaagttggggctgtgcatataaaaatgtgggaatcatcacaaaagaaatgggtattgaataccagtgaacagatgtgattacctagggagaaaactgaagtaagccaagaaggggctcaaaagttgagtcctcaaaagcaacatttcagagtttaaaaaaatttcctcagccagatgcagtggctcacgcctgtattcccagcactttaggaggccgaggcaggcagatcacgaagtcaggagatgtagaccatcctggctaacacggtgaaaccctgtctctagtaaaaatacaaaaagactagccaggtgtggtggcgggcacctgtagtcccaggtacttgggaggctgaggcaggagaatggcgtgaacctgggaggtggagctttcagtgagcctagatcttgccactgcactccagcctgggcgacagagcaagactccgtctcaaaaaaaaaaaaaaaaaaaaaaaaaaaaaaattgcctctgacctctctcttccgcagagctccaaccatgaccctccttagtaagcactcaataagcgtcagctattgctactagtattaaaaaaaccaagaatagaaccttgaagagctttggattacagaggctggtggactaagcagcagcagccagtgatggctagaatataacagtgggagaagtgagaacagcagtgtctgaaatcctctgcatgtgatggtggtttacacttcagaaaagtttccactatttcacatcacttgtttttcacagtagccctaggaagttagtacaacaggtatccttattcctctttactaagcaatgaacagtgacaaagagagagcaaaatctctaaggctgagtgcagttaatgacaggtctggatttcctgattctgattctcagaagtcagagctatgggctgaattgcttcactacaaattcaggaccctgccctccagaatattttaccggaattcatatagagtaaatatgtttttatattatgtattttttatttttcttaaaaatatataatattttttattttaagaaataaaattagcccagctaattttgtatttttagtagcgatggggtttctccatgttggtcaggctggtctcaaactcccgacctcaggtaatctgcctgcctcagcatcccaaagtgctgggattataggtgtgagccaccgcaccccgccttttttttcttacccttaaaaaattcctgttaacaaaagccttggcttcaagataagagctagaggcaggtggcttgatttccagttctggctccactatatattagctgtgtaaccttgagctcactatttaaaagctttgtggctctctttttggccgggcgcagtggctcacacctgtaatcccagcacttcgggaggccaaggcaggtggatcacctgaggtcagaagttagagaccagcctggccaacatggtgaaaccccacccatttctactaaaaagataaaaattagccaggcatggtggcacatgcctgtggtcccagctactcaggaggctgaggcaggagaatcgcttgaacctaggaggcagaggttgcagcaagccaagatcgtaccactgtactccagcctgggcgacagagcaagactccatctggaaagaactaaattaattaaaaaataaataagaaaatagagccacaaagcttttatttatctacaaaatggaaaaaataatagtacctcagggttattcggattaaattagctaatccactttagaacagtttagaataaatatctttacctaataaaaataataacagtaataaaattttattactgttaggtttttctttcactgctaaaacacgaatgaacagttttccagtatttttttccagccctttgacttaagatactttttaatcacaagtgaacagaaaagaacaatcaaaaaagccctacttattggtattagtgaagaaacaaagctacctgaattgggaattactttaaaactgcactgtagtgtattttagttacataaagtaattaaaattaatgtttagaaaaaagtcttagtccatgatttctgtaactacagagaaggaaaaagagaaaagaagggaaagagagaggtgggtagggagagaaacaaagaactagagtaaagacctctttgtcctcagtgggctcaggctttccttaagccatgacacagctaagtcttaaagatgagtaagagttgaactacaaaggtggatttcattagggaaagaaatctgaactttcaaggaggtggcatttgaaacaaatttgaagggtagaagaggaattagccacagatgataatcagagaaggcaagtataggtggatacaaaatcatgagcaaagacaatgaagttggaaaacaatttgtagttgatacctggcatgtaatctagatcctcaaagtgaagtctgtggaccacagtatcagcatgcctaaaagtctgttagaaacacagaatttcaggctgggcatggtgacacgcctgtaatcccagcactttgggaggttgaggcgggcagatcacctgcggtcaggagttcaagaccaccctggccagcgtggtgaaaccccatctgtaccaaaaatgcaaaaaattagccaggcatggtggtgggcgcctttaatcccagctactcaggaagctgaggcaggggaatcactggagcccgggaggtggaggttgcagtgagccaagatcatgcctttgcattccagcatgggcgacagagcaagactctgtctcaaaaaaaaaaaaaaaaaaccaaaaaacaaaacaaaaaaaaaaacaaaaacagaatttcagacacactgacctactgaatcagaatctatactcaaagactcctgtgtaatgcagattaaactttgagaagcactgttccagaacatttgactggctctcaaattatcgagttttaaaaaatttttgatgctggccccatcccgaaaacttctatataaactggtatgggatgtggcctggatattgttgttgttttaatcttcccaggtaagtctaatgtgcaaccaagtttgagaaccactggagattgcaaaacagcttttcagtgagggacagtgggaattaagcctaaaaaaggttcattgggctggaccagagagcttcagatgccaaactaaagataggagaccctttttaaagctaggcattagggtctaaaatccacaggtatgtccatttgcctataaaaaacaagtcagttctgtaccagagcatgctgctgacttgaagatgtgatgtatgcagtacatatttaactgtaaagtatcagctgccatgaaaatccaatgaattgctgtttccaagtttttttttttttttttttttttttgagactgagtctcgctatgttgtccaggctggagtgtgatggcccgatttcagctcactgcaacctccgcctcctgggttcaagcaattctcctgcctcagcctcctgagtagttgggattataggtgcctgccacctcacccggccaatttttgtatttttagtagaggctgggtttcaccatgttgtccaggctggtcttgaactcctgatctcaggtgatccgcccccctcccctgcccccggcttggcctcccaaagtgctgggattacagacgtgagccaccgtgcgtggccctgttttcgtatattttaaaatgtttcttaaaaatacagtgaaatggctaaaaggaatgattggttttctgatttagtttctcccacctttaggtttgaaaggcatacaaaacccaaagcaagacagattcctaagtgcaactgcatctatctcatatccattatctaaaccagaaaagggagatgagtcaaaattctatttctgaaatgtcatcttgatggcttctgccctcacaccttcccatcagatggcgctgtcatcacagtttataccaagtgtcaatatttttatagcaagtacacagtcacttagccaaggttctcatgctttttatgcaacattgtacttggtgtaaagtcttttgtccaatgaatgaccttcctgtacccagtgtggttggggccaacaggctctgattgcataaccaagaaaagaaaaagttataagaggaactaactcccacttaaaaaaaatcacccaaaacatcctcactggaatataagtgggcataattcacagcatttttttaaatgatagaaacatatccaatatatccagaaagataacatttgcttggattgaggtgagaagagaaaggccttgctactcattacgaaattaacctgggaagttggattggtttttaggagacatggagaaaagtagtgatgatcacacatctacataaatattaaaaattatcaagccaggccaggcgcagtggctcatgtctataatcccagcactttgggaggccgaggcaggtggatcacttgaggtcaggagtacaagactagcctggccaacatggtgaaactccatctctactaaaaatacaaaaaattagccagacttggtggcacacacctataatcccagctactcgggagactgagacaggagaattgcttgaacccgggaggcggaggttgcagttagccgtgatcatgccattccattccattccagcctgggcgacagagtgagacttcgtctcaaaaaaaaaaaaaaaaaaaaaaaaagaagctgtgtatttataatagctgaagtatgatatacaaattatatatcaagcttcaaaaagtcagggggaggggtttagagaaagcagggagtgagactgtagtaacattatcataggaccatctaagaagcctggtgcctacaagattaggattaaatgataaaaacaggtgagaaaatcctgatcatcatcttctgatttgcccaccctctgcaagatgatctacccaagtgagtcactttccttctttggaacctcagcagagtcacaggggaggggtgttgaaatcacataggaggaattgatactttcatgttcttggctccaagcattagtgacctggggcatggaggtcagtagcacttttaatactaaaaaggaagccaggtcctgtaggggggcagagagaggaagtgctctaccaacatgtttccataagccaggctgtcctaggtgacccatctaaagaggaagatacttgtctgaggtaagtaaacatcttcaaggtcactggaactcctgggccccaagagaagtcgaattctaaaggttgtcctagatctgcaaatatagtctgttgtttatatgggagtgagcagggttattcttaaaattgttcttgccttactcaggatttctataggagctgtatcttgttctcaggcaggtaggcatgcaagtttgtcagcttttcacactaaacaaggaggagagacaatatatgggaagaactttgttttatggaaaaggcaaattcataccacaatagcacacaaaagtatgaaaacctctgccaaagaatgatttattttgacacagtaagactggttataaaacacagatgctttatgcaggaatcttccagcaagacaagacattctcagtggagcctccactaaaaagctcaaatacaattaattcatcccattatgactgacatggacaggaaaagcgaaagttctttgcagtggtagaagtttgtctctaattttaatttggttatggaaaagaaatttcattgtaatgaagtaatgacgcttttcttccttttgaaagattagttgaatttttggagaagtgagagacttacttacaaagcattcagaaatagctgagatgctctatcctgactccttatctctggccctttctgctcatggaagtcccaaacttcttacattttgatatttagggaagtctcagagattacctctctcagccacctcatttcacagataagactaaggcccaaagggctacaaatggcttccccaagcagctgaataacctgagcttcagacagaactagaagagggtcttcccaacacagtctaaaactgtcaccaaaccaaactgggtgtttgcccgtgcacaatggacagtcgaacaccaaacaccaaagcaccaggtttttgcaggagaaaggtgtattgccacttgactgacaaggagacaggaggaaccactcaaatctgtctctccaagctgggggctgggtcatgtttcagaagcatagggtaatgaggcatgatctgactggatcctgcaatggggtgacgccaaggctctatctgactggatcctgccatgagacataagcttcttaattagctccccagcctgagaacttaggttcctcctatggttgcatatttagttcatctgggcatgctcacattatgtgaccttcatcctgggggtgtccatggcaactcaaaaacaactcacaactttgttacataaaagttgagggccgggcgtggtggctcatgcctgtaatcccagcactttgggaggccaaggtgggcggctcacgaggtcaggagatcgagaccatcctgactaacatagtgaaaccccgtctctactaaaaatacaaaaaattagccaggcgtggtggtgggcacctgtagtcccagctactcgggaggctgaggcaggagaatggtgtgaacccaggaggcagagcttgcagtgagccaatttcgggccactgcactccagcctgggcaacagagcaagactccgtctcaaaaaagaaaaaaagttgaaccaggtggtctggtgcaattacaaaacacagatacaataataagcaaggctctctggaggtcacctagaaaagctcactgccttctaagagctttccagtacaccttagggccttgtcctctaaggcatctagcaggtagcagcatcatgttaaaccaccccatagggaatggagggcctctattccctaagacttttctattgaatggcaagtaaggcttacactagttgtcttaaaaaaaaaaaaaaaaaaaaaaaaaaaaaagaaaaagaaaaagaaagctaaactcactatctactgtctctttccacaggatcataagtttttactgccagtattgagaaattcgtggaagaaatgtcagcaggaagtaaaaattcaccgagaagtgtgtgtgtgttcgctgcttccacacattaatggcatgattttttttatgcaaaaagaaaagaaaagaaaaccacccacattttaatttagcatgagccaatttacagagcatggaaatcactttcatttccggattggcgcgtgtgcaattagcaatgcagtgtatatacaagaagccatgctgttaacagtttatctcaagtaatttggtgtcatttacaaaaggaagaaattcctgccatcagaagggacagaaggagatggaatgatcaaatcacagagaaacactaaaattactaaatctacaacagctcgccttatttttcttggacccaaactgtcagggtataaacactatttgtttcttttttaaaacatcgatagttttgctgtaaataataacactgtataaattctaacagaaaaatagaataaaatgttgataaggcactgcctcttagaacacaaacagaatattgcaaatgcatttaacaaataggggtctcaagtgacttcaccctagaagaggagggagggattctgggtgggggtgactcttcactgattcttgtatattagcaattataatgtttgtatatgcaaaactgctagcttgattttaaaaaaaaacaaatctttaaaatctgctgcaaatttaaataattcccaaaatgaggaattctgtagttctgtgaaaaatttttttcttcagaatactaatattttgatgcatgtgtatcaccttattttgattaaatcttttccaattttgcaaacactacagtatactgcaacacaaaagattttatctgtaaacacaaagcccttcatctaatatttgttgctattgccaatttttcaatgaaatgacctaaaaacaacaaaaaaaaataacctatacggtagttgctttagggggtggggggatgctatctgttagtgcttaaaagggggtaaatgcttgccgctttagaggtggatggtgctcataaaaggccccagtcgggggtatttaaaaaggactgaacagaaatccttagctagtagaatggcagcacgctgtaaaattattactgtattgtgtactggctataagatgtagacacctttcagtaagccaatcatttgtaaccattctagcagtgtcatattaggttaataaggctgctgtgttttaaagggcatttttatttgggttttggtgaaattctttaatttgttgattatattcacataaaatcagcattcattgacacatagctctaatgacatatgtatgaaaaaccatacactggatgacctagtcgattatttaagcataaaataaattgtgttaaactcttcacctatctgtgctctacagtctccttgtgttttctggcaaaaggtagttgtctaatcccttgtcatatgagtcctggccaatccaccccattggtcctctttgtgcctctgtggtcactgaagagataatctctaacattcatatgtgccctgcaagctcccagcttataaattctgtgcatttcatgggggagccaagaattaaagattaattgacaagtaagctttgcccacatctgttcaggccttcttgaaaagtgaagaattggagatactatagccagcatgtcaaaaagttgactggcacttctaggaaccatcaacatgcagttgcttttagcccacagagcttgtttttgttttgttttattaatttacatttattgtccattcttacaagttgggacatttcacataattaagttgctaacatctcttaaaaagcaagatttggcaacaatggacctcattcccagaaggtaacaacctgctagagccaagttgtccctgccctctccagccaggtgtggggtctacaggtatcactgccacagcctcatttcttatatttgtacaacctgactgtgaatttgcaacccatacactgcgtgaatctaaattctactgaggcagagaccatggctgttttaacttttattctagttaccagcttagcatatggtagtagtgatagtagtaactgtgatcatcatcactaaaactggagtgctcactacatgctattctctgttctaagcacattccatttacttacttagtcctcatatctactttatgaattaggtactgtctttctttgatggtaatgatccttttataaaattaaattagtgctaagagactttcagcaatgttatatattgcctgtccattaaagattgttgccaaatggagtgagttgtccccagtaaggattcactatcaatgcagaagaaatgcacggataatctactttgcataaagaatggggctaggttgcatctgcatggtatcccaaataaataaaatgtgccactacccttgcaccaaaattattttatgatgggtaaagttagacccttgagaggttttttttttaaaaaaaaaaaaaaaaaaaaactttcccaaaatgcctctctgtaaagccaggatcagaatataggtgtcctaacttcctatctaagagttacgaatttctgactcagtctttgagagaaggtgtttatcctgaaccagaaactcaatgatgtatacctgtttaggtattaaatagttgtgtttatatgcccaaaaatttgactttaggtatatgtgatatgctttggttccgatcaagcaggaggtcataagtttactcagaagtatccaaaatatgacattcaagatttaacttgcatatgtgtgtatatgcatatatttatacatgtatatgtagattgaatgtgacattatgtatttctaacataatatttggcctgccagcttataaatatgtatttaagcttttcattgattgacattactgtaaaaaatgaattatgattgagaagttctggatatttgctgtttttttcattttatattcttactaaattattgaatttgttaaattaaaatgtgctatcactgtattgccaaattatggcaatacactatgcagtattatttcaatactttaagaggcatctattacttcattgaacacataagcagctagcctcctttcctctgtaaataaggactttttggcatcctgatgttcctcgctgttcatttggtatcatcctggagttccatcaagactgaggattttctccatggccaataaactattgtcagcatcagctcacgtttggctgtatgacagggatatgtgagaagcccagaaataaatcacaaaaataataaggcatcttctgagtctctctgaagaagccagtgatccaaaaactaacttcatatctgagtgagtcttggtattcttgatttgcttgaagaggctgtgacatattacaaggtgtgtaatttcccaggcatatcacactgcttctgtttcatgaattgatcaaattgtccagaagtaaacatttacaagattgagatttgaaccaaacttttcaagagttcttttaataagaggtggaaggcagtggtgtaatttctttacacggttacctggctaaacatgtaccaatacaaaaattaaataatagagcggattctgataagtatccttagtaacaagcccaacagctttcatttctttaatagaatgaaatgcagatagttcaaaaatagagcaaaatgaaatttaccattatatctgctgcacttattcattgttagctacatatgatatgtacaagtaggtgaacatgaagtgaagaatttttactcttcagcccctagtgcttcctgagttagggagtaaaacgccctgagggttgcatttccaactggacatcctgagactcctcaccaattccaaaagctttccatagcaaagttgagatgaacatgctcagaggattctaaggcagtgagaagaaccaccttagaatgccacaggaagcacaccagaggcaatacctatgaggactttttttctaggaccaccatggaactctgatgtcccaaaaaacgtgatctccctgcctgatttcccccaacatcctcaattaccgcttctcctttgtcatctaattcaaccattggcataattctgagagctgggatagaatgatggcttgccagcttttcaaaaatgttctgtcacatgacgtatgtcaccaggtcttcatactagactgtacactccctggggacagggactttgttttgttctatgctatatctatagtacctaggatggtgcttgccaccttatgagtgctcaagaaatagttgttgagtgcaagaatgaatgagtcagcaaacatcagagggcaaggagcagtaaatagggaatgttactctataccattttctttacaggctcaaccaacttggaaattgaaggaaagcacagcttttgattctaatgacttcattcaccaaggactaacttgtgtcaccaacctccactggtccattccagttgcacaacctccttcttagccaaagagtccttagtaattggggtatggatgttccaatacctcatgagcaaagagcacacagtcatgctgctgaagtggccatccttcctgtggccacgggctatggtgctcatcctaatcactgactggccactgagaaaccaggcaagagtgtggagaacccatcatgaaccttcctgtctataacaaagttagtttggttgcctccaccttggtgttgctgagtaaatgtgtttcaccattcaccacagctcctcttcctttccctgtttcctctaaaatccaacttactttattcatttctatcccacatctctgtttaatatcattagaggaaggaaaagaaggcaaacgaatgctattctgtttaaaatccttctttctggcaagccagatatctacctcattttcatcccgtctctctcaatgccagtaagaggaggatggaataaaggagcatgtaactgagaagacaaagatggatcatgtggttctccaaacctatgcatccctccaatcattcttctcatttcacaacatgtactcagtgcctaccaccttccaggtgctctcccaggcacaggatacatcagttccctacccactcccgtcaaagtgaggagaataccaccagcctctgtgtgaaatctaaattagggctcctcaggacaggaaactgtagaattacttgtggaaataaaactaccgcagcacatcatagggagtgcatgctgaagaacgtgagaagacatgtagaatggggaggaacagccctgtggctgctgagtgtaaccaatgcactttctctttttttgagatggagtttcactcttgtcacccaggctggagtgcaatggtgtgatctcggctcactgcaacctccgcctcctgggttcaagcgattttcctgcctcagcctcccaagcagatgagattacaggcactcgccaccatgcccggctaattttttttgtatttttagtagacacggggtttcaccatgtaggccaggctggtctcgaactcctgacctcgggtgatctgcccgcctcggcctcccaaagcattgggattacaggtgtgagccgcccagccccactgcacttccatattctgcctgctagtcagaattaagtgggactcaaggcctgacaaaaatatttcaatagaaaactttaaaaacattttaaaggtagctaaccaactctataatactgtataagctcatttgacttccagagattctgaatttaggtgaaaccagttgtaactttgaactcatgcacgatgttctccttccatatgtcaactcctacataaatcagaccacttcacagagtctgtccctgccgatgccagtccacactggcaactggtaaactaaaggaatacctcacaatgtggcactcaactctacatcctctggtagtccccttgctctccaacaagccttgtgctttccacatttccatgagcagagctgggtatacagacggtttgtaatgttgagcttcacatgcctaatcatttaactgttctttatggtaaagccttagacttcagctatgctgcaatacacatctgatagctcagtctgggcgcacaccccacccactggaagccagtgcttaagtgcagtgaagagtggagctagagctatcacacagcctggctttctgacactgctatcatagtgtgccttgcccaggtggagcctgaaataagtaaagaatatctagggaaaagcctatgaaatattagcctatttaagaacatgtggctctaaagaataataaaataaaacagatgtagtggtgacagctgtagcattgtaagctttagagtagccctcatgcttctggccatgataacactagattctcaagttccttaggccagagtggtcacactgaagtgtctgtggagactaggcaggtcatctaagcaaaggggttgttgtagactattgtacataaataatagctgcctctccctgagggtggattacacttcccagccccaatgccttcacccttgccatggaacttgctttgggcaatgaaataacagcagatacttcaggagatagtgtatttttgttaatgtaccctttcctcactccagtgatgctccagagagactgctccctgctctgctgctggggtgaagatgatgtggagcagaaccacagtcaacccaccatagataagcaatgtgagcaagaaataaacctttctagtaagccagagatgttttagtcatttgttactgtggcataaccactgccccaattaatatacaagtcaggtataagacattaagggctgatgggtattgggtaagcaaattcctcttctaatgaggctgccttgtgggaatataagcccagctctgccagattttgaagttttctaaatattggcaactaattttttttccctaagaatattgtatgggccaaatgaaacatgcctgtgggtcaccgttttcaagctctgccactagctcttggcatttgcaaaatggacacgttcttagatcatgctacacaaatttattaatgtatgatttttgatcacaccctgtgagactagtgtgcataagcaaataactcctgagtcggattcacagactaccccttatccccacctcaatacagcttggtttttctctatgcgccatttcaaaccctggaactctaaggatctcaaggagtcacttaagcttttttactcacattttattgccttcttagtgaagacttcaccagtccatttgggctttgtatggttccctgcctacctgtataaccacatctcatgccaccttatctctttctctcattacactttagaccagtgataaagtgtagcccatggactgggcttagtctgagaagcccttgttacctgtctgcaatgagacaagaaacctgagccagaatgtaaattgactgcattactaagcatattccttagttcagctgatctaaaaaatacagtatgttaacttatgtaatacatagtgctccccatatagtcttacgttgtatttatttcagaacatatcttggttttatgactagaataaagcttttttgagtccatgggtctcagctcttattcctttttattcctgatacatacatatgtctagagcggtgacttggacacagtataaactaaataaataccacttgagctgaatttgatttacagccatacccaccatacatccatgtcccactttcatcccctcatgcagattccaagcttctcttgaaaaatcagaagagctgacaaatctaggcctgaattcctgcattgcagtattttgttagagctaactaagcactgtttttggttggagcatgtgctctcaagttttctacagtctctactattctatcatgccttgcacaaggccctgtggcacttgatttttgaccattgtaaagccaaaagagtttagattgcagctaccattttgccccactagggttagaagagttgcagccattatagaacgtagccactcaggctgcctgaacagttcttttctgttattgtttaaccaggaagattttcatttcagccagaaagatggctcatttttctaacaccaatttagcagaggctgtgcgtacttgggtgattcaaagagtcatctaaagatctgatgccatgacacataccagatgactttaacaaccttcccatcacatgtccttggcacaaaatggaaaaacactatgatgacacctgacagtaacagaagtctcatgaaatactgtggtgggggagttgttataaagctcttctcagcaagacttcactgggggtggaagcacagcaaccctcaaaggcaaactgaagttttgataccttacagtgagtcactgaagatgtgagtggttttccttgacattcacagcattcacaagatactgatccaaagctatacttatttgtgcttcccttcatccctcatttatttattcaataaatgtttgcatgactactagtgccaggccttgtgctaaatgctatggatacagcaatgaataagaaggacaataaacaagtgtacaaataaacaaggtaattatagtggcagatgctatgaaggtaataaaaatggtgatgtgacggaataattggggggaatcaagatactctagagagggtatgcaaagaaggcatagagagcgtgacatttggaagctgagatggagcttccctggcagccctctgccaataagtacaaatgagacaggatgagaaaagaaggcccttgacattttttgagaaacagaaagaagaagctggtgtggctagagccgtgctatgcagagcatcaaccagtaacaagatcaagaacttgtaccagcctgtaattctgtaccattttcttctcaagaaaatattacaacatatattagtataaagcacaaaacagtaagtgccacatgtgttggctgttatgattgttaatagtattattccattttcataatgatctcaggattggttgacgaagtgaactggaaatggcctagcagagagccttgcacatattagacacacagtaaatactagtttaatgaatgaatgcttagtggaagagcagcatttgagttggaacttgagaagcaagtatgactttaatatgtgaagaaaggaggtctaggcaaaaggaataagaggctagaaggcataaagccatccaaagaagtgtgagcaaaatttgttttgatcataatttgaggagaaaggaggaacaaagatggaaaagagtgacttaccgttaagagacatcacaagaattgtaggcacggctttcagcagccatcttcatcaatcatatcttgtgtgcatttgctcgcatcagcatgtttgcaaaaagtagctgctcaatgactgcaaggctctattacacactgggctcgccatgcaagactctaaggcttgggaacctgagtccatatttgaaaagtgtttctgagttaagtgggagatatacctgggcttgaaaacctatctttctggacatgtaccataggaatccatcttcacgtaaccttaacaaagcaatttctcatccctctcccaagtaagtgaagcatagttttcaccaaatgcattttctaaagccagttgaataagaataaagaagccattggatgagtgtgtcatttgcatgatttaaaagctaatcaagatcaactgcagaacaagaaacaactacttatgaaatcctaattgttgactgactgacatgaggcaacatgagcaaactaaggcccagagaagttaaatgactctttcaaggtctcacagacagcttgtggtagaatcaagactagaattcacatattgcaccacaccctactgcctcccacttggtttatggatgaacctaaagagtcatgtataggggatggtgcaaaaaggtatctcgctccagctggattcacctgaggtctttgtgactgcaaatcaaaatgttatgaggactcgttggcccttatcttttatttaagaggaatttttaaagtgtattttaactgacaaataattgtacgcattcatagggtacagagcaatgttttcatacatataatgtagtgatcgattagtgtcgttatcatatacatcatctcaaatatttgtcattttttggtgttgtgaaagtttaatatcctcctatttgaaactatatattattgttaactatagtcaccctacggtggtatagaacactagaacttatttctcatttctcctctagctgcaattttgtatcctttaaacattcagcctgttgagcatcttctctcttcctttgtcttccctcagagtcctcttgctgggtctcctgctacttctctaggtgctcctgattagttggtcccaacgagatcctcttctcctacccatccttttaccattgggatagaccaaaactctgagtgatcttatccattcccaaaactttagtaaatattaatgtgctgacaattcctagtctttatctccccccaccatatctctgccctaagctccagaactcatgtatcagcagccttcaaggtctctccactcagataccccacaggctcttcaaactcctcatatccagaaatgaatacatgcccatcccctcaaaagaagtcagctcagatactcttctctgtgaatggcatcaccatccatctcttgcccaggtcagacacttgagaaacactcaggtaatccccctgctactccatccagttcaaaaacatgtccatcatatctcctagtctcttcaattgtcgccattcatacagccctaccttaggtcctaagttctcatctgagtaactgcaataacctcctaactggtatttctacctctgacaattgaatatagcttttttttttttttttttttttgagacggagtctcgctctgtcacccaggctggagtgcagtggcacaatctcggcttgctgcaacctctgcctcccaggttcatgcaattctccctgccttagcctcctgagtagctaggattataggcgcccaccacaatgcccagctaatttttgtatttttttaggagagatggggtttcaccatgttgcccaggctggtcttgaactcctgatctcaagtgatccacctgccttggcctcccaaagtgctgggattggctgggtgtggtggctcacgcctgtaatcccagcactttgggaggctgaggtgggtggatcacaaggtcaggagttcaagactagcctggccaatatggtgaaactccataatttcgtatttgtaaaaatacaaacattggccaggcgtggtgatgcatgcctatagtcccagctactggggaggctgaggcagaagaatcacttgaacccaggaggcagaggttgcagtgagccaagatcatgccactgcactccagcctaggcgacagagcgagactctgtctcaaaaaaaaaaaaaaaaaaaaagtgctgggattgcaggtgtgagccaccgtgcttggtcatgagcatatatttcttttaaaacctctaatcatattacttctgaagaatgaactcctttgaatatcatataaaacttagcggtaagacctttgacatgtcacttaatttctctgagcctcagtttcctcatccatgtaataggtcaataatccatacttcactggattatacagagaattagactgaatgatgcaggttaaatgattggcaaagttcctgacacaaaggaagcattcagtagattgcagctactggggtttattactaactgtaggccctcaattatctttcattctttatgtggctcacactggtcctttaaaatattttgttaaaaccctctcagaaaatgtgattctggaatgatctcaggaactgagatggaactcagttccaaaatctgctccctcacaagagtacttttggcagtacttagattctcccctctctagattccctctccttgccctgtggcttaacagcattgtttattctcctatctcttccttctctctgccctctctattaattgtgagctcttcaagataagtgatcatgccttatttgttctgctgtactaaatactctatgaaatgtgaggactacccatcctaccccatgacagctcactcccagtgtttcaactgtctgattatcatcctactgtatgctcaaccaattctttgaacatagcatactttgttgcaaaatacacttccttttattaatacagtcatccctcagaatccataggggatttgttccaggacccccaggagataacaaaatccacagatgctcaagtccctgatataaaatggcatagtatttgcatataacctatgcacaccctcctatatactttaaatcatttctagattacttataatacctaatacaatgtacatgtcatgtaaatagttatactgtactagttagtgaatgacaagaaaaaagcctacacatgttcaggacagatgcaaccatccagttttttttttcccaaaaaaatatttctgatctacagttggttggattcgtggatgtgcagcccacggatatggtgggaagactgtatatggccaaagaaaattctacgaacagtaataatacacttcctttcttctgtctcctctttatcagccatttttttgtttgatttcaccatcctaggaggtagacagggcagaaaccaaagagtgtcaggagtcacatagcaagtcagtggcagagttgggcggatccagtgctattagtacagtcatacataactagatgcatacccataattagatttttttaaataactactttcccaatacatgcaaaggctcaggaaagcaagggctggttttccattctctagtaactcttaagacctttttaagtgggaaatttttgtaccattggtttggacatgggatacatttattaggatgaaaccattaaagtttctgagaactagaaattattcagaaaccaccaatctgaaggccactctgaaaaaagtcaaggaaggataaagaagagtaggttgggcataaattggagttaaaatatcagcattatgagggacttccctaccttataaacaattgccctaacttttactacaataacaaaataaatgcttctgtgtaagaagagttgaaactgtcatgtcaattttaaatgcaaaaaaaatttataatttcaaatcaagaggattgttataaggcttaaatgaaataattcttgtaaaatacttatcatacctagaacaaaatagtaccaagtaaatagtagctatttttgtcacattagtatttactaatgttccctgacgtaagaatcacctggagtgtacctgtcaaaaatatcatttctggggcctatacaaggcccattaagacagaatctccaagcaaggagacccataagccctatgtttacagttgtattttacatgatgagtaagggaaaaattctatactaagaaattgtggccatcttagtgattttccattaatcccaggatgtgtttggcacagggtggtagggtctggcattcaggccactcttcttccctctccacattcaagtcttctagtatctaatttataaatataggaaatattttaatattctttcagtaaaagcagagaaaatcttttctggttactgtgttcatactgagtagaagaacctgttactgaaaaaccaggggttcggtcttggtcctgctgctcgctgcacagaaagccaatcactatgatgccgagtattgccaaggaagaaggctttaatcaggtgctgcagccaaggagatgggagctcagtctcaaatccatctccctgactaaaaccaggtgttcatttggcaggcaagagagataaaaatgtgtaagaaaacaggaacctgggagaggcaaggaagcaatcttggggaattaggggtcggcatctggtgtggtgatctgatttcagttctttcatacttttctgagaggcctaaaggtcatttcctgaggaatgaactcagataaaacaaatgtaagtttcaggctttttaagaccagaagggtcaatttctatgattatcaaatagaacagtccatggggcaattgggttggtttcaaaatgactttaaatggaaatatgtattttttaaatccccaattcatctttactgcatttgaaagtcattgatacttaacaaaatcaacctagttttccatttgcacagacatctgggaaaatcctgggacagaagggacttgaaaagaagaaatggataaaatagaatatattaaagctggccagtatgaatcaaataaacgtgtatagatttaatatacttaatattttaccagtgaaataatataacaatatcaaggatattttgaaagaagaaaaaagccacctaaaatcctactagcatcatgactacaccaggccctccagtccacgtgttctgcatctgtggattcaaccaagcatggatcaaaaatgtctttaacaaaatgggtggttgcggccaggcacagtggctcacgcctgtaatcccagcactttaggaggccaaggcgggtggatcacctgcggttaggagttcgagaccagcctggccaacatggtgaaactccatctctactaaaaatacaaaaatcagctgggtatggtggtacacacctgtaatcccagctactcaggaggctgaggcaggagaatcgcttgaacctgggaagcggaggttgcagtgagcggagatcatgccactacactccagcctgggcgacagaggaagactccgtctcaaaaaaaaaaagatggctgcgcctgtattgaacaattatagactttttttgtgtcaattattctctaaacaatacagaacaacaactatttacatagcatttacattgtattaggtattatatctaacctagagattttttttgagatggagtctcactctgttgcccaggctagagtgtagtggagtgatcttggctcactgcaacctccacctccctcgttcaagcaattcccctgcttcagcctcccgagtagctgggattacaggtgcacgccaccacgcccagctaattttttttgtacttttagtagaaacggggtttcaccatgttggccagactggtcttaaactcctgacctcaggcaatctgcccatctcggtctcccaaagtgctgggattacaggccctagcgattatttaaagcacaagtgtgatggttaatactgagtgtcaacttgattggatggaaggatgcaaagtattgatcctgggtgtgtctgtgagggtgttgccaaaagagattaacatttgagtcactgggctgggaaaggtagacccacccttaatctgggtgggcaccgtctaatcagctgccaccaaggctagaatataaagcaggcagaaaataaacgtgaaaaggctagactggcttagcctcccagcctatatctttctcctgtgctggctgcatcctgccctcaaacattggacttcaagttcttcagctttgggactgggactggctttcctgctcctcagcttgcagatggtctattgtaggaccttgtgattgtgagagttaatactacttaataaactcccctttatatatatatatatatatatatatatatatatatatatatcctactaattctgtccctctaaagaatcttgactaatacagcaagcatacttcatattattgtgctttgcatacactcctcttcagaaaaaaaaaattgaaggtttgtggcaaccctgcatttagcaagcttatcagcaccatttgtccaacagtacacactcacttcatgtcttggtgtcacattttggtagttcttgcaatatttcaaactttttcattattattatatctgttactgtgatctgtattaaatgatctttgatgttactattttaattgttttggggtgccatgaaccactcttatgtaagacagtaaacttaattgataaatgttttgtgttctgactgttccactgatcagctgttccccatatctctccctctccttgggcctccctgttccctgagacacaatgatattgaaattaggctaattaataacccttcaatggcttctgaatgttcaagtaaaaggaagagctgtatgtctctcactggaaatcaaaagctagaaataattatgcttagtaagtaaggcatgtccaaagccagtataatctgaaagctaggactcttgcaccaagcaattagccaagttgtgaatataaaggaaaagtccttgaagaaattaaaagtgctcctccagtgaacagaaaaatgataagaaagtgaaacagcgttattgctgatatggataaaattttagtggtctagatagaagatcaaagaagccacgatattcctttaagccaaagcctattccagagcaaggccctaactctcttcaattctatgaaggttgagagaggtgagaaatccacaaaagaaaagttggtagttagcagaggtggaatcctgaggtttaaggaaaaaagctgtctccataacaaaaatgcaaagcgaagcagcaagtgctgatgtggaagctgcagcaagttatctagaagatccagttaaaatcattgatgaagatggctacactaaacaacaaactttcagtgtagacagaacagccttatattgggagaataggcatttaggattttcatagttaaagaggagaagtcaatgcctggcttcaaagcttcgaaagacaggatggctctcttgttgggggctaatgcaacttgggactttaagttgaagccaatgctgattttccattccaaaaatcctagggcccttaagaatcatgctaaatagtctgagtgtggtcgctcacgcctgtaatcccagcactttgggaggctgaggcaggcaggtcacttgagatcgggagttcaagatcagcctggtcaacatggagaaaacccgtttatgctaaaaatacaaaaattagccaggcgtggtggcaagtgcctgtaatctcagctactcgggaggctgaagcatgagaatcacttgaacctgggaggtggaggttgcagtgagccaggatcataccacagcactccagcctaggtgacagagtgagactccatctcaaaaaaaataaaataaaaaagaatcatgctaaatctactcttcctggtgctctatacatggaacaacaaagcctggatgaagcatatctttttacagcataatttactgaacattttaagctcactgtttagacccacagctcagaatatttttttcaaaatattactgctcattgacaatgcacctcatcacacatgagctctgatggagatgtacaaggagattaatgttgttttcatgcctaacacaatatccattctgcagcccaaggatcaaagagtaacttaaactttcaagtcctgttatttaagaaatatacttcataaggctgcagctgccatagataatgattcctctgatggatgtgggcaaagtaaattgaatgccttctggaaaggattcaccattctagatgccattaagaacattcatgattcatgggaggtcaaaatagcagcattaacagaagtttggaagaaggtgactccagtcctcatggatgactatgaggattcaagacttcagtggaggaagtaactgcagatgtggtggaattagcaagaggactagagttagaagtagagcataaagatgtgactgaatttctgcaatctcatgataaaacttgagcagatgagaagttacttttcatggatgagcaaaaaaaactttttaatggttttcctgggatggattctactggtaaaatgctgtgaacattgttgaactgacaaaggatctagaatattacataaactttaggtgataatgcagtggcagcattagagaggactgactccaattttgaaagaagttctgtgggaaaaatctatcaaatagcatcatatgctgcagagaaactttccttttttttttttttttgagatggagtttcgctcttgttgcccaggctggagtgcaatggcacgatctcggctcatcacaacctccacctctaaggttcaagcaattctcctgcctcagcctcccaagtagctgggattacaggcatgtgccaccacgcccagctaattttgtatttttagtagagttggggtttctccatgtttatcaggctggtcttgaactcctgacctcaggtgatccgcccgcctcggcctcccaaagtgctgggattacaggagtgagccaccatgcctggccgagaaactttcatgaaaggaagagtgaatcaatacagcaatcttcattactgtcttattttaagaaattgccacagccaccccaatcttcagcagccacactctgatcagtcagcagccatcaacactgaggcaaaaagattatgactcactgaaggctcagatgattgttagtatttttagcagtattttttaattaaggtatgcactcttttagacattatgctattgcacagttaatagactacagtatagcataaaagtaacttttatatgcactgggaaaccaaaaaaatttgtgcgactcacttactgtgatatttgtattacagtggtctagaaccaaccctgcaatatctctgagggatgcctctatataagaggatatgcatagattatatgtatatactacatcactttatataagggacttgaacatctgtggattttggtatccacaaagggtcctggaaccaatcccacaccgataccaagacaactacatttcgtttctgtaatttccctctcagttatttgtatgattctgtgtgtgtgtgtgtgtgtgtgtgtgtgtgtgtgtgtgtgtgtgtgtgttgggagaattgctcaatgtcttcttggtctgtgcccttttaaactagttgtactaaagagaacatttgtcatgtgactacaagcaaagaaagggccagaaacctttttgtcataatactgcaaagctggttacttttgacagtgcaaaaaaggctaaatgttaacaggtgctggaccttgaagaaaaaggagtgggtgtgtagcagagatggaggaatcgggatggaaagaaatgaaggagtccatagagggcagaagctcctcagcaacagtgagagcaatggcatgggcagccccaagagttcaaaaggaaaatctatcatatgtgagggactaaatagaatgagctgaacagagtagagaagccatcactattcctgtttttcttgggtggggtggggaatgattccatgtggatcacagtaagcacttgagtgcaatgtaaggcctattctctataaccttccagattgcatttatgaccattcagctggagtaagactaatattcaaaacagtcccaatttttagatttcaaggacaaggaaaacagagcttcatgtgcatacatgattttatgtagtttatatcctgctgtactagttatatgacctagggcaatttacataaccgttatgtttcttcatctggcaaatgggggtgatagttttaccaaccacagatggtgaagatgagatcatccatataaagcacttcaaaaatatctggcacagagtaagtgtgctccataaatgttacctgctttttattactggtagtggtggtggattatgcttagaggtaaagcagaggaaaatgccttgcttgggtctctctggcttatgggtagtggtgcatgcaggtgggaggctcatgacaacctttcacgctctaggatgctacaggctgctgcagaggcctggggacacccactctggcttccctccacttcagtcctgcctccagtctgcttctaagacctcagggctccagcagtcttctctctcccacccacactccaaggcaaatgggctccattcctagcccaggatcctaagaaactttacccttaggaccccttaggcaggatcctaagaaactttatcccttctctaccatgcagctccccctctctaaagtcaatcactgactcccttctctaaagtagaaaggtccctcttagaataatagtttccaatttcatttgtatttctctaaatccacttctgctccaaggaaaaagggaaaattttgttgttgttgttcagagtcataaaatatgtgtctaccttgggtggggagtagcagttgagtcatgggaaacttctatccagaacttatttttatgagttgagcccacatcagttaactatgccaactgattaagataagaagcttttggttcttggatgatttatctaattcgatttgggatgatgaagaggtaatgttcaaagcttaccaagtcataaatgagtgaattccctagaaaataggatatcggaagggagaactccctcttctgggtgcaagctgggcagtgacccaaaccagaaagcatgctgagttacaggtatggatgagagaccatgccacactaaagatctgtaatcgcaggcagcaaagtcaaggcgggctttgggtgttctcatgaggatactggaaagcttctgacagcactaacctagaggcaacgctgagtttggcaaccaagcagttgggataggaggtgagtcaggaaagaattcaggattgttgttaaatgctttccctgttgcttgggtctgccaccttcaaatgtggcgctgttcactctgggagcatcttaaaggtaccacttttagacttccgaagtcttctgcaaagtacaaagtgcctcaaaaacacaggttgtttttaatgctattgttatcaacagtgtatagtggcactgattcatcagaaatcattcaaagtctgtttgcttttcacaactattttcttggccaagggactaggtgttcttttttttttttcttttgagatagtcttgctttgtcacccaggctggagtgcagtggtgcaatctcagctcaccgcagcctctgcctcctgggttccagcgattctcctgcctcagcctcctaggtagctgggattacaggctcccaccaccacgcccggctaatttttgtatttttagtagagacggggtttctccatgttggccaggctggtctggaactcctgacctcaggtgatccacccacctcagcctcccaaagtgctgggattacaggcgtgagccaccgcgcctggcctagacattcttaattccagtgctttgctgcttttatttctttgctactttgtacccaataggggaaagtaggaatattagactccaaagagttattttcttctgatttctctagttttctgggtgctataag

SEQ ID NO: 5674 - DNA, 814612 bp, Homo sapiens
  C10orf11 gene - 77212525 - 77987136 of chr10; NCBI Entrez Gene ID: 83938; Build 35; sequence includes 20,000 bases upstream of initiation codon and 20,000 bases downstream of termination codon of the gene
aagccctcgatagatgttagttattattattttattgttaattatatgtggtctcatatatatatgagacctctcataatgagatttatcacagaaacctcaaagtaatctgttcacccactttctaccacactctgccagtggggcaccattttataaacaagtgtgaatttgaccacaaggaaaggaagcttcatttcttcctaccaagaaagaaagggactccctgggggacttgagacctattttattctaattggtcactgggtctgcatacattatcccttttttcatgtctatcttcaaatttagccagaatgctcagagaacagggtgtcttggataatttaattttgtgactaactgataactacaaaacaccactttcagttcaagttttatttgtgaaaagtttttctaaaatccagtgtcctttgtttctataggaaatatagtgaataagaaaatttaatctttccttgacaatgaaagattttggagtcatttcagaaaatctgttcctgatggccagaaatataaatgtaggtaaagatagaactacaggtataataagcccaggactaccctgagaaagatttgtaataatgcccttaaaaaaaaacctagtctttgcaactttcccttaaaatcagagtatgggtgagaagttatgattgatggtttgggttctttggattttcattttttaaagactaaattataggaatagctctctcatcacaagccttcaaggagttatacacagtagacaagtcaccttgaaaagaataacggctttattatcagaatcaaggatgatatcgagcaaaacagtttacgagttgagtaaacaagagatgcagtctagctttgttctagtttcgaagtcttccttatttctccctgcaatgagttctagctatttcaaatcaggacaattttttttttttttttggcaggtgttggggaggtgggaaggggagaggtgttcctaaacctggttgggaggtagtgtgttgtattggatagagccctagagttgggaaacttggtttccaaccctgtgtccaccatgcttagcggaatgaccttggatgggtcaggggctgtctttgaacctcagctctctctagctgaatgatgcaggggtgcaaactgatgctttccaagaagccttctgtttgaacatttagactaggagttccatcaaggtatcaagcgtgctgtctttctttactcttccatcataatcaggagacttcaggaactgcttgccagtgaatctggtcgcatggagacccggctgagggtggggctggtagaaaagcccagatttatttcatgcttgctttccctacctgtcttagcctctccctttctagctctctctttctccttcctgcccactccttcctgctccaggcttctccccggcccatctagattattgattggaagtcaccaaatagtttctgtaaccatgtcatcaacggctgccaagactcttgtcattatttcagccacacagactaaatgactaggggaaaatggcattttccagctccggtgcaaagcattctaaactgtggttgagctggggtttttcatttaaactccgtctgaaagtctttatgcaaaacagcctgttcccagcaagtgagtgagttcatagagcccccagtttagattctcgtaattttccatatttctttagcttgccctggttaccctcctgcctagtgcatggtagacaggaagtacacaaaggaattgtgcaaagtttggaagcaactggcaggtgggtttgcatttttccaggttaattcacttgatgaaaatctgctgtgggtgatgtgtcatatatcaaaggcagggcatcagtaatctttgctcaagggcacggctaacagacagatagacgggagaatgagatggaaaaaagcaactcatccttttctgctaacaccacgaaggagataaaggaagatttatgagtcatctcggaccacataccagcaagcagcaaaccgtatttttcacatgttcccaaaattggtggtggaaagcaatctggttgtcattgtgtccatccagtcttttaggaaacaatgggatccttcaagggtccggctgtggagtcagctctttgccctccctgcaagagacacgtgtgtgtgtgtgtgtgtgtgtgtgtgtgtgtgtgtgtgttcatagcatctctgccctcttcaagcacatgatctttagtttaataatgtgacctctgtaaaataaagaaaaaaatatatgagtggaaacagacatgactattgggccccaggcacttagatgctgacttggtgaatactttttcagttgtcactcatctacttagttttacttttgtaataaccagcttcatttatttcctgctttggggtatgaggaagaggaggacactctttgttaggtgtcttttttttttttcttttcctacctctgagatgagccaatccctgtcagatacaaacaaagacttgcagcccaggttaatttgaatgggctgttttgtgtggagttaactgaggacactagttattgagagtgctcagggtttctttattcaggcagctcagcagctggctctagaagtgttgtgtggaacaactgatggaagtgtgaagagatttcttaatatttctctccccagccttgaaaaaggcacctggattgcagctggatcacgtctgtgtttgtgactatttacttcacatggcaatttaaaaactattgtaaattccaaaaaattggttttgaattttttctaaggcctctgtggtgtgctccattttttttttgagaggcacacaattagcattctgtgcagaagggcatgattgattctgcacagtggtggctatatgagcaaacctcatttagacagctgagtgaaatatacagggcagaggaatttatgggacccagagaagctcacgtgcagaatgaaaaggagccaccttcgcctcttcccccacccccgtcccacttccccactcttcacttgttcaggatttctccctctccagccgctggggtgcccactgtgtgtcatgatgctgctgagcctgacatctcccagcagagaagattgaatgccacttaatcatgcagccctcctgtgggaagcatggagtatgcaatcagatagacaggaggagcgctcagaatccgttatgtgaggctgagatggtgaggagggcgtggagaacagtggctctaggtactacacgctatcctaaaaaatgtctgttggaaggagtggcttttctaagtgcttcaggcttctgtactgaccttcggctggacagattatttggagggttgggtgttcaccttagggaatataggccactttcttagaaatatcaccaacttacttttacaaagtaagtccagtgtaggaagtgattttatcttattcaccaaagtggcacagagtaggtcctctataaacaggtgctgcattgaactgacttaactctcactaggatgtggcttttcagagaggaagcatcttgatctgatgggtttgctggtctgtcccagtgctgtgggcagtgcttggtacataatacatgctcaaaaagcattagttgaaggagtggaagaataaacccccagaatgacatttggtagacagagcttctcatttccctcatggcttatgcataggaatggctttccactgaggtgggcaatgagagggatgtttttctgcttcttccttccgaacccttccctgggatttgcatgctgttctttttttctttttctttctttctttttttagatttgctaaaatattgatttatttcctgttttattttttaaaaattttaaattttactttaagttctgggatacatgtgctgaatgtgcaggtttgttacataggcacacatgtgtcatggtggtttgctatacctatcaacccatcatctaggttttaagccccgcatgcattaggtatttgtcctaatgccctccctcccctttcccccattccaagacgggccccggtgtgtgatgttaccctccctgtgtccatgtgttctccttgttcaactcccacttatgaatgagaacatgcagtgtttggttttctgttcctgtgttagtttgctgaggatgatggtttccagcttcatccatgtcccttaaaaggacattaattcatccttttttatggctgtataatattccatggtgtatatgtaccacgttttctttatccagtctattattgatgggcatttgtgttggtttcaagtctttgctattgtaaatattgctgcaataaacatatgtgtgcatgtatctttatagtaggatgatttataatcctttggttatatacccagcaatgggattgctgggtcaaattgtatttctggttctagatccttgaggaatggccacactgtcttccacaatgctagaactaatttacactcctaccaacagtgtaaaagcattcctatttctccacatcctcaccagcatctgttgtttccagactttttaatgatcaccattctaactggcgtgagatagtatctcattgtggttttcatttgcatttctctaatgaccagtgatgatgagctttttttcatatgtttgttggctgcataagttttctaatgccttgttcctgctgtgtcttgattcccacctacctgctaatgcatccttggaagctaacctttctgatttttttcccttgagtgaaattcctgtccatttaatggcagtcttagtgctgtcggtgaagactgtcattcattcatctgctaatgtaaattatgccagaaaacttaacgtgatttctacttcaagggataatttgaaattttaaaaagctatttgattagagtcttctgatatatatgactttgtgtctttggtactgatggtaggctaaaaatgccccccgaaaagaggtcaggtcctaacccctggaacagtaagtgttacctaacctggcaatgtattcgcaaatgtgattaagttaacgatcttgggctggaaagattctcttggaaggtcctaaatgtaatcacatagatccttctgagagaggcagagggaaatttgaccgagacatggcaaagaaagtgatgtaaagatagaccagatgtgaaggggctggccttggagactgtggtgatgcagccacaagtcaaggaatgctgcaggcagcaggagctggaaaaggcaagggtcagattgtcccctacagcctctggagataatatattccagaggcactgatttcagacttctagtctccaggactgtggggaaatgaatttttgttgttttaagccaccaattttgtgcccatttgttgtaacagccatgggaatccagtacggcacctgattgtcctggcactggcatcgtggcactcccagaagttggattggcattattattaggcagcccattctccttcattgatggactttatgggaaggaccactataggagagaaaagggacacattattgtagaaatgtccttagtaatttctttgctgtgcattatctattttattcccataagaaccttgtacatcagatgggtaataatcaccccatgtttatgggtaagggaactttcaggttataacttagttaaggaaagaaagccagctggtgaatactgtagttgggatttgaatgtaagtatttcagatcctagtgtagtattttattcttttcactatggtgttatgtttcatttcagctcacttaccattttccgagtctccaggtagcatcagacacattggtatttttctgggtcttgttccttttctccaaatgcggtctttcagtcccagcttctgttatattaatatactttgcttaacctggaaaagactactgttacatcatggcagagtacttgactctgatagccaggtggctctttgtggttctttagtataaaaagtaactgtgttatatagtacaatgggattgtatgtgagtctgtgtgtgtgacagagagagaattggaacaaatataattgaggtgcaaagtaaaaatgctttaggattgtttttgaataactaaatataactggtcacctagacatctcctgtttcagacatctagcttttcttgatttggccagggcctgcaattcagatgtgagatatcagtgttgaaagagcacttactccaaggagaagtcagacataatgggagctggaacccatcagagacgggcaaagtgtacatgtcctatgaagcctgtgagattcgagagagtgttttgatttcagaaattgcaatcagaggtttgcttcagccttcatgctgtcagattggagaagtttaactctgaggacagctaccggagacacacaaaatcaccatctttgtatgtgcagtctttgtcacttccagcaagttataaaattacataaaaggagccgagtatgatactatcacttgggttgccacaagaaaaatcttccaaatctgagaattattaagaagtgtgaaaatctcttaattgcaacatgttctacactgcacaaaaagactatgtggccgagaaaattggcagtgttctgatgatcacatttaacagctggaatgctcctattcaaaccacttttgtagcaataaggctaataatttttttgcaaactgctgtgatagccataattctgttttgttaagatgtcttgtttctatgtgtgaatgcaaacatacatacttattttggtccatcattattataagtatggtgggggtggtggtaaaggtgtgttaatttattttatttttttatatttcattcgttttctccccttatttttaaaatttgtatcaagtatctgttaccttattttaaaaaaattttaacatatcaaaattggctaagcaacattgttatttgttttcgattgcttatgccaggcatggcatcctcattcctgttcttgtcttgtgtagccgcttgatcaagaactggccaatatggtgaaaccccatctctactaaaaatacaaatatcagcttggcatggtggcacatgtctgtaatcccagctacttgggaagctgaggcacgagaatggcttgaactggcaaggtggaggttgcagtgagccaagagtgcaccactgcactccagcctggatgacagagctagactctgtctcaaaaaaaaattattttaggttgggtgtgatggttcaagctggtaatcccagaactttgggaggctgaggcaggaggatcgctgaggaaggaggatcctgggagtttgagaccagcctgggcaagatggcaagacaccatctttacaaaaaataaaaaaattagctggacatggtggtacacacgtgtagccccagctactctgaaggctgaggcaggaggatcccttgtgcctgggagtttgaggtggcattgagttctgatctcaccactgcactccagcctgggtgtctgagtgagaccctgtctcttaaaaaagaattaatttaaaaacttacagttgaaaaagtttcatgtatggtggtaatggttgcacaacagtatgaatatacttaatactactgaactgcatacttaaaagtggttactatgatacattttatgtaatatgtatttcaccataatttttaaaaagttgtatatgcacacagttaaaaatgccaatagcattaaacagtcagccaaaagtaagccttcttccctatagcagttcttttcccagaggccaccatcactaacagcttcttttgttgtcttccagaaactttttgtgaatattcaagcacagaactatattttgaaagaattgtgtaattggaaaataaaaccatattggccttgtggaggccgagggtggggtggggcaagagaatgatggatggaagagagatgggtgggtgaagtgaggctgctggtgaccaagttctaattcagaacatttgtggaaactctccttgctcgggtctcatgccacgctatttcatcaaggaataggaagctgaattgggaacttgtgggaagccaggaggagaaagtgagttctatggagttgtcatttgctgtagtccagagggagatagctgtgagtaatggggtgaagttaagcagagaggaatttaggctgggaaaatcaggacaaatttcacaatggggcgagtgtgtagacgtgtccgtggggaggtaatagacgccttgccactggaggggctggaaataagacttgacacaaagcatgagaaaatggatgatagggaactgtccctgggggttggtgtggtgaccttaatcaggctcttccctgcctagctctggattcactgattcagtctcaaatgatccaagggagagaaacaattgcttggaaaatggccgtaggggataatggctattgacagcagatattggctcactctacacaggttcactccctccctccttccctccttccttccatccatgcattttttttttttatctagtcatccatttagccaagagttctttaacacctactaagtatatgtagattattgagggcactttacataggctagtaagaaaagtcattgcaagagaggacatttatgctgaggcgcgtgaatcagaatggaaagacctggggaggaacattcccgagagagggcactgcccttgccagtgctgcaaagtgtgaaaaagcctggcgagtttgaggaccagaggaggtcagtgtggctggtgagtgagaggggtgatgaggctgaaagagctttaaggtgaggttgaagtcaggaagcaggagccaggttggtcagggcctggtgggctctgcttaggagttggaattttgctctgagagagatgagatttgagtatggatcttggatggccttctgtttctgctttcagactttccttataccttccagttcctactttttgagaatcaggtgtggcagtcagacagaggtgggggggttttgtgaagaagggtgtggcacagggcttgaatcaccaggtgtgggaaaggcaggttgggcaagaagctgagactgggagagggattcagcccgtcttgcagctctgtggttgcttcaggtggtcagagttttcagggggaggcccatggtaggaaggcaattagtactggaaaagatcagctaaagcaaagcaacttacatggaaagcagtatgtaatagtaaatctagaaaaaaaaagtttggaatttaatcttgcaagctgaaacccaaaaggataaaaatatttggtatcaaaaacattttcagttgtagctgcagctatgctctaattctcagaaaagcaattcaactattaatttaatttttctccataagtgttaatgacagaattacacgctggcaccatatatcttttacttcatgtttgcttttattgtgcaatcattaaagttgtttatttttgtaaaattaggactttatcaattttatgagggcctttcttaatccttcagtatttaagtcagtcttataaaatgttgttattgacttgatttttgctttttcagttggcctaagggcataggatcaatggttttgggtgtaatttgagcatttctctgtcacttcagttgagttcgtgaaacgccacatcttttgcagaagtttcggtttcattttgcagttgctttgcaccagaggcttatgtaacatttgaccatcagatgggcctaaattgttgatacaaggatcagggatgaatgctacttggaagagaagtttgagtgggaaccggtcaattcgctaatgaatagttatgatgactttgtttccttatgcaaattcaaaactgaaagtgctcgaatagcaaatatttgggtaatgaggttcttccctattaaaatgtaagtacctaaagtgcgtcttgctgtggaagggcccaaaaggtacaaaatgtactggctttcaatatcctgtcatttctagttaggtttaggtatatattggtcatttgcaggactagagcacatttcatagccagagtgccctgcccctcagggcactattcttattttttggggggggtgggatgggggggggcagattaatcagggatgtatggatcatcccagcttgccctgggaagcttcttggaatttgggtgtacaccttctgaaagtgaatggatttgagtaaaatttaagaaaaatacaaaagaaaaaggaaagctctccatcttgttaaaataaatttgttcagaaaagtatcgtgaatgtctatattcattccactgcgaccttgccactgttgacattttaggtagaaaattgtttgttatgggggactgtctcatatgttgaaggatgtatcacagcatccctagcttctactcactaggtaccagtaacacatcctttgtgacaattaaaaatgtctccagacattgccaaatgtccctctgggtcaaagtcacccctggttgagaaccactgatctcaggttagcacagagaggctgcaatggaaagattgtagtatgttaactaggtgaagggattgaccactcccagttctgagcaatttgatgggttcttaaagaaagcacagcccttggagctggggaaggaagtttgtgactcatggtggtgaatctagggggttcctgtgtgggtccagtggagcaggtctggtgagaggggacactgggagccccagaactccgagcccctgggggacgccaatgaagctgtctatgagaaacatgtgggaagagggagacagatgaatgatgaatgttttccacgtccttgagttgtgggtcacctgaggtctaggcctgcggtgaggccactcactcatttcagctcacacttcgcccagtgagtaatatttgttccagcctttgggtcactgtttactctgcctcccctcttgtcagttccctctggccttctttatatctttctgaatatgagtcagtcttcaagatccagctgaaattctagctcctaatggagcttcctcaactatcctggcccacgttgagttcttcctgctctaatgctcacattacttaccagagcttttatttgggcatttaatcaaaggtagttgtgtttcattatattcacatcttgtgtgtttctcatgtcctcactgagtctgtaagttcctttaaggcttagtctgtatcattcttttaatccgccatgatacacagcatagtatgagtacatggtaggtgttcagtacatgctaagtgaatcagagtaaatggaagtcagtcttcttgctcatcctctcagtgtcatttatgtcttccagatcctctccacacactccagccctatttctttaaatagtttaaggagacagcacattgtttgacagttctgcaaacataaaaaataatttatctcacacttaatttttatctgaagacaagtttaatattttcaagcattacatttttatttttaagttcttacatcctttttgtttctcttaatgtcattttggcttcaaagggtataattttgaaattatgagtactgtaggacttgttagtatttcttctttgtgtgtataatgtttcaagaactgttgatggctaaatgtcatttttatactttttggattcataacagttcagttaaattcaaaaataattaataatattatgtatcttagaaatagctgtcatgtatctggtggatatgacatattgttagatattttaagttaaaagttctgtatgcaggccaagttgagaacgatgaggagcagactgttttatagacaagcagaaggatatagtagatttatgacaaagcatattaccataatgtaaccatgcttggaaaactgtgtggcttctcaactcaaaaaataaactagtgatcagtagcctatctcaaacacttttttttttgctttatttatatctggtttcattctgaaaacagcaagacaactgacaagttaaataagatattaccactaaataacaacgtacccacggcagttttcccagatccttgagggcagcttagacatattggctctttgatttttagaacttaagcagggatgaaagctctccataaagggtcattgtttccaaaatggagctttccaggctggaaggaaacaaggctttcaagaatgatatcagcggtgggaggtgtgggggaggatcccctggcctagcctcagtcgggaagtggtttatctacattcacttagctctgtcctagtcaattgaaaccaactggccattaacttttccttcacagaagtggattgttcttccactgtagattttgtggggccttcctgagaggggcctatcaagaaggttaggcctgtccacacaaggattctccatgttatttttataggaagaggtcagatttagcctttgcaattcttttggtctgactcaaacaagcattggagattttcctcttataaatctgtttttttgagatggggtcttgctatgttgcccaggctggagtgtaacagctattcataggtgcaaccacagcacactacagcctcaaactcctgagctcaagcaatcctcttgcatcaacctctccagtagctgggactacaggcatgcacaactgtgcccggcttccttttataaataggttttcagcttgcaaagaaatgagcgacagcttattgcattgattctaacagtgttgtatcctcaggtattggaaaattccactagtggtcaacataatgggtcatgatgtcccatgtggggacttaaccacagtcagtatgatcctggtccagtggtcccccgaacatgtgtgagtcatatgtaatgaggatgtaagcagctcttgtgcgtggggaaacctcccacatcccactgaggagtctctgtttgagctactccaaaggaatctcttggtggctccacagagcagtcttcttgttcccacctcaattcttatggcattgtccaaggtagcaatgttcctggctgtcttttcacagtcttactttcaaggagctccaaaacctctagagatctccagcgtagaggtagacctggaaacatgacaagtgcaggccttggggatgctgacttaagattctgaggcagaagaaaagtgtagagagcacactcctctgtttgcctcagacctgggggccaggacactgagcctgctatgaatacccagcttgaggagtttagttagcaaaccatgaggctactataatttgctttaatatctgcctctttccctttgctgttgatattaattaaccttaccccaaactcaaggagaagcagagaagaagctatttacaacttcctttattattgatcaactcagaaccacattcattcagtgccacttagatgctgaacactgaggaaagcattgtggaccaatgatggagaaagccttttacaactgctgctattgctgctttttctctcgagaacttgagaatttgggtcctggaagaactcacagagatgattcagtccagtagttcgcaaggttctagaaatcatctgggggcatattggaggaagaagggaccctgatccactctcagaaaccactaggttttcctgtactatttgttggacttgatttggaaaaagagttctgcatgccaacataagcttgaaatgcagccttcttattttacaaagggggaaactgaggttcatgggccagaaggaacttaagatggaaatttggggattatttcccattccatgtttggctgtatccctgtaatattttcagtgctattttgggattcatatttgtatcagttaccagagattggttcccctaagtaaatcaattggacactattagcaagggaattgcatgctgtacattttaccctgtcttagagagaagaaaagttcctatctcctgtttgcatatcttttatgaaaacaatttaaaccgcacctgtttaaacctttccacagaaatgtctgaaaggtaaacagttggttttggagcagctataacgtggcattgtttaacatggcagctcactgatggttgtctttaattatggccgtgctgtcaacccctgaagtccctgctctttgttgtagatccgatatgacgtttgaggttttcaaagctgcagagatgaaagaatcaacagtcaaatattgctcattctgatatgcttaaggagcgaggagggggcattgcccatgagggctgcagagccggggagggaaagctggtgccctctgcttttgatggcaaccttgagtggggagccgggtttactctgtttgtaagggagcagggccaaggctgggggagacggaaatgatttattcagtgatggtaaacaagtgcagagtacaggctgccgagctgtgcagggctggtgggaaagctggctgtctcttgcccccagcagtttgaacattaaagatgtgaagctcaaagcagacccaacaaggctttctggaacctcccccagccccttccatttcctttgtcttcaatctcccagagctgtgtgtctctgggccatcacatactgctgctattcagggtgttaattgtgggttggtcccatctcagaccaaaggtagccttttgggggctgcttcagtctggctcctgttattgctaacatgggttgccactagctcttttctcagacagagctgtcccatggcatctgtgcctggcagagcagtctcctgcttctgcaacaagctgcttttgttgaagggctatgtcttcagaatctgtttaggtgtgtgagccacctctgctgggtaccctcctgactggggacctactttttcacttcactcccagctcccacttgagaggcattgtggtctagcggttaagagtgctggccttagccaggctgccgggatctgaatcctggtcttgccactcactagttctgtgatttggggcaggtttctctgggtttgtttcctccttgtaagatggtagtaacagtggaacacatgttgtggtcatgatgaaggctatgtgacttaatatataggatagtgtccagcacaaagcaggtgctataaatatatatttatatataacacagatagtgaatagttatatataatgcacatatatgctatatgatgtataatgtataatttatatattcacacaattataagagtaagtttaactggcccagcaggggagggaacagtaaacacactataatctgattcatttctggggagatccaccctagccccagagtagagatgaatcttccctcttgtccatctatttctttctttcttttttttgagacagggtctcactctgtcacctaggctggagtacagtgacgtgatcttggctcactgcaacctctgcctcctgggttctggtgattctcctgcctcagccccctgagtaggtgggactacaggtgcacgccaccatgcccagataatttttgtatttttagtagggacggggttccaccatgttggccaagatgatctcgaactcctggcctcaagtgatcctctgacctcatcctcccaaagtgctgggattacagacatgagccaccatgcctggccttgtccgtctattttttaagtatttcaacttctgccaccttccccctgctctgtgagtattcctagctcactgatacttgcccgttaattgtgaacatccatgttattggaggccagatcctgtcttaatcatggaaacttttcattctctgctttctctgtagtcaatcaatgaggatgggggaggcacctgtggtcagcttggcatggtgctgcctgctgtggggtttacagaagtaggatcagacataactcctacctttagagaactttcaatgaaactggaaaatcaaaatgaactctcatgaaatatttaagagcaacactcacctggttaaagagattagtcagtttattcactatcttgtcactatttccaaggaatagactagcagtatctaaaaggatgaactagagaaaaggcagaagtgctttctgccttggagagggttgagaccagtgctgaaggtcatggtttcacaagaacttagctattaccttgggccagaagggaagggatccaagtaggaataaattggcctatttgtaggaataagggaagttcacatttatctgggaatgactgtgatcagagcacccagctagatgtatgtctagtatcatttaatcctcccagctagcctctggaataggtggtattaaatggttcttttgtaaaggtaggagagctagggttctgtgataataagtaatattttaaagtatcatagccattaagtttgcagagctgagaaatttttacacaagtcagcatgactctaaaatcttgtgctcttttcacttctgtaagaaagggacactagctactgtttttctcatttcagttttggatgaattaagctagaaaacatttatatttgaccccttttgcccctctcccccaccccaataaaagcaagaaataactaccattggccaccacattctcctctgggaccagtagagaaaacagtgatattatcagcaaaagcctaattacactacccaggaaaaacaagaaacctcccaaagtcatgtccaagccaagcaaagctctgggagaaattcctgggacattcagcaagagcaacctaaaagggcttttgagcagaaattgaagccaaataaaaatactgcatgctagccctgggcccataaacagtactggaattgcagagctagggcatcatgcttggagtggtagccaagccaggctaggctctgctgttgtaacaaattaaccctgaaatctcagtggcttaacaccacaaggcttcgtttcttgctcaccttataggcccagtgagggttggtgttgagggagcctggcttcttgtagtgactcagggatctggctggatgaaggctctggcatcttgtggctgtaccttctggatcatgagacctccaaggttgcatgggagggggagtgaattgaatagtgacccccccagccctacaaatttatgtctacctggaacctaagagtgtgacctgatttggaaatagattctttgcagatatagttacttaaggatctcgagatgaaatcatactggatttagagtggaccctagatccaaaaactggtgactttgtaagagaaaggaggagatctagacacagagacacacagagggaagaaggccatatgaagataggaagagattggagtgatgctgtggcaagatggttaagccggagccaccaggaattggaagagccagggagagattctcccctagggcctttggaggggatgtgaccctactgacactggattttagattccttgtacccataaaagtgaaagaataaatttctgttgttttaagtcattgcatttattgtcatggctatagtagctagtatgggagatctatactgtgaagtgactcacatcccttttttgctatattgactagaactcaaaccaactgtgagggagaatgtcaaatgttgccatctgtgtgcccaggagaaggagagtgaaacaggatttggtgaacacatgttcacccttgtactttgggtacagtaccaagagtaagggatagagacctggaatatagatctccctgctgacagagatgctttcaggagccatcagggagaccacaggatcactgcaggtcaaagcaggacagcaatagctggaggacatggctctgaaggtgaatgtgagctatccatagttgacatcagagtccatagaaatgcaagaggagggtcaagcaaaaaagcaagaacccaccccaacagactggggatgacatgcaggttctgaggccaaacaagaaggcacaagtactagggccagtggggtctcattgcccctcactgggcagctgctcagaggttgcttgagagcaggcgagtctccctggctccccttcctgggagtgtgtcaggatagttttgctcatctgtgtgtctccagttgctagcactgtgtgggtacccagcaagtgttgttgtgtcctgcctttcatcaggggcatgtttgaaaccataggctgtatgatagcaatttcaagctcaaacttgccattacctaaaggaataagtcttaactctttagtatgattggaacttcccccttgtccctgccagagcatggtgatctgtcttgagcctccatgcctttgcacctggcatcctctttctccgaagtgacccactcttccttttccaccttgtgaagacttgccttgatatcactgtagcagaatcttccctgattgccccaggtagtcatacctttcctcattgacctcctcattggcctttgtatttaacttatatggtgcagcaatattgaaatcatttctttatttttctgtttgcctcacttgactgaattttgcatttttcattcacctctttgtcccagtgcctggctcataataacctccgatacatttttgttatagaagaaacatcatttctcccagggactcctttcagacagctgcagaaacaaccactagtagttctcaggaatggagatgatattatgattattgactaattaattggttattgatttattattcaccatgagaaatatagatgggagaaataaatgaggaaaaagatcaaaatgggttagagtataccgtttgtggagaacaacaataacaacagcaaacatttctgtattgatttaagatttataaagtgctttaatgcgaacattatcttatttgttctcattgtaacacagtgagggaagcgaggctataactgtaaatctttttgctgatacccctcatggatgattcgattcacatgcaaactagtgagcaaagaggagaagaggagaagaaaggaggaaaaaagaggtttaggtaagggaaagttgctttatttagtttctattctttaatattcataactaattctgcgaggtcaatctcaccactcccattttgcagatgagatcacagagaattgaggtggtaacttgtttcaaatcccccagctgatgagtagtagagattggattcacacccaggttttctctctctctgaagccctggtcacctgtttggccctggggtgatggggagaaggttctggctgtgtcttggctatctcctgcctctccctctgtggggaatgtgttcgaggatcacagctacagcttttcggataccctttcctttgtgaagcatgtgagaaccaacattgcatctcggcaagatttaaaaggaattgttgatgacctgctgaggtattttcattttgttcctggaaatgattaatcttgaggctttgtgatggcctttgtcacaaatagccttccttaatccataattttctcactttcctttaaggtaatattttgcatttaagaaataaaaacaagcaaaataatcctgctgtgaggatatgaatgcagtgtttgtgtgtgggggtgtgtgtgtgtgatgctgaccaaggtctaaattcacctgaaatgaattagaaaaaccacctttttaaaataagttcagtttgtcttttttgctaactctatttgtcaatcttacctcttccttttattattattttttcttcttcctctttagcagatgggatggaatatttctgttttgttttttatgggtgatttttcaccggcttcttccactttatattgagtcacttaacatcctgtgaagcggaaaggaggccggtactttcagcctgaggtcggccagggtgctgcaattccggacagagagatgtttttcccttgggttgggaatggcatgttctgagcttcttttgacttctagtcctcgctgccggtgcagttccaagtagagtcaacataaagccaggcacttgtgagatggagaccggggcgaaactgcaagcagatgccctttgctgactgttgaagaaagaggatctggctgaaagacccgcaactttcacttgttgagaacctttagccagcgccggcgtgcatgtgttttagttttattctttttcccttgcccccaaagccgtggagtacctgctgttgctctcatgcctcttgccaacagtggcatctgctcagtgtagccatcaagaatttgaatgtcaatatctttgccttgaaatgaatggaaaagtatttgtcactcagcggcaatcattcttcaaataaaaggttagccagacaggacccttaatcaaagagtcggtcttttctgtcagcagtgccttttaaatagcaatgatgaaggctggctgtcagggtaggacttgatgagcgagatgattgatctgcataaatcattttcttttaacattgtcagtgaagagtaaattggtgggacattttgggtattagctgtgttgaaattaatatgcagtatcctaggtgtgtcctcgatcacatagtcctcataaaagaaggtagaaattaaaaggaggcttttaggcatgcattgttctaacaagaaagttgcaccattcttactgctgtggtcatcatcttgcatgctaaattcggaagttgagtgtgtagcacattttacaagctccaaaaggaatctagttaatttgggaattagctagagtcagtagcatttaacaaccagtaaatctgtaaagacttactgctcagaggcaaaaaaaaaaaaaaaaaaagtctgagaatggtttctggttttataggatagggtatctactacctagcatgctgttgtagaaatagactcagctttagatgaggcttaggcttgaatccacgtgccatccctccaaagtgagtctccttgaccatgatgtaagtattaacctttttgagtctgtttctttgtctctaaaaatgggatttcattagttaccttgggtggatttgcttttggtattaaacagagcaatctaggtgaaagcgccaggcacattacctgggacatggtgagcaagtgctcaataaatgttcatctcctccctttctttcaatcaagcgaaatgccccaaaccagccaagatgtcaagattaaggatatgccctcatggtcaaaataaataatacattgcctggtttgggtcattctgtatttactggaatatcttatggccatttttatgtcaaaaacatatttcagcaaggcagaagcaatacctaattgccgaatactgaaaatagggaatgaggtggaaggaatgggagagaaatatggccagggacacttggtttttcttaccattacactctagattatgtgtctgggttcatatgattaaactctgaacaagtgaaaccaatgcaatatagtgttgggattaaaagtaggactggtggagccagatggctcaattcagatcccagatcttccgcttaatggctatgtgactgcaggtaagagagctaattgcctccctgagcttgtttcctcacctataaaatggggatagtaatagggttatcttacagtgttgttaggatgattgaattagtatatacaaaacaaaacatgtaaaagagtacctggtatgtacatgttaaccatgattactatgaatggttagttggttaagaaaggtagataatgctggccgggtgcggtggctcacgcctgtaattgcagcactttgggaggctgaggcgggaggatcacgaggtcaggagattgagatcatcctggctaacacggtgaaaccctgtctctactaaaaatacaaaaaattagccgggcttggtggtgggtgcctgtagtcccagctacttggaaggctgaggcaggagaatggcgtgaacccgggaggcggagcttgcagtgagtgagcagagattgcgccactgcactacagcctggcgacagagcgagactccatctcagaaaaaaaaaaaaaaagaaacaaaggtagataatgctgaaattcaagtgggtcaacagtctcaaaggaagaaacatatttagatatagaaatgcatgataatggtatactggagtgaaatacttgtttcattttggagaaacttgcctactggaggaattttgagctaggctgattccaaaaacatccatattgaagcaaataggttttgtagggtcttcgggtaaatagcctttacttgctgtgttgaatgtgaaggttaaaggaacacagtcttctctagccagattctccatgcgccttctgtaatggtaaagtccacgtcaatcgctgcttgtgggcgtgtggcatggacgcgcaggagcctctgtaacatgcatgtggcatgcagctgcgtggattcctggagattattggagatttgccttctcttcattcttagagatgtgcatttgttttcctcaacttgcttttagctcagctgattggttgtatgtgagctttgtgctcctctcctttcctgtcttctgaatttatgctattttgaacttttggtctgcttctgcataatgagagaagttggcagaagacaattccagataaaccttcaccaaaactaatggttctgtggaagtccttgaacgggtgtggaggagcaaagctctcccagttcccaggtgagcccagggtggagatgtaagaccacaccgaacactgagcatggtcaccaggctgcttttgagaagcgactgtgaagctgtcctcctgcaggggcatgatggctatatttgagaatttctggaaaacattctctgcctctctggcttgcaatgctcttgggctgcaggagtggtaaaattgtgctgttagattcgttcctgattccatccttattagataaagcgtggcctgtgttatctaactgactacttaatggagtccacattgggtgtgatattctgctcaagattaatttcgggtaatgaagatctgaaacaaggtatttaagagccccactaatgtttcatttatagcaatctatcaaaacgatagatatttagcctctttactggatatgaaacattaacttaaagccagtgctgctttctgtgttaaataccagtacccctgccttcgattttatcaaacattgtgaaaaatctgccaccacctcccggagaacacatatcatggacttagccttaagttatgattctctggcaccttggacaactgaccaaccctagcttgggccctgcttgggccttttcacataatgagtagaattcacaaacaaatatttatcgggcacatgctgtgttcaaggcccactagacattgtgagggggacacaaagtggactcaatttcactgcatgcgatatgctggaaaagagatatcttagcccaaggggcaggctcattactcctaagttggttattacattgttcagttatgagcagatgaggcctagaaaaatctgggtcgcttctcctcataacaacttcccatttggggcggtatgaaaagtgtgggtttccatcaattctgatgagtaggtggagtccattcctcagcctttaggtgctccccattgtccaggagccaacagttgggtatttggggctccagaacaagtatccaggcacctaaatggtatctagctaatatttattgatgcatttttctaaggaaaaatgagcaatttccacttttcattttcaagcttaatactcatgactgtccagtattatccttacccctctctagttttcttctctttactgtttttattgttcattggaaatatgttggtttagtaccaattgtgtgctgttttcctatatggaatatattctttctgatttttttctgattcaaatggtatctattcttcagggcctttctgaagacccgtgtcttcctgaccatattctctgtgcagtttttcttctttccaggaagaattttgtttttcttctctgaattcataaacatcaaggtttgaatatgcatccaatgcttgaacatagatgatggttctctagatatttttttctatgtgtaattcattttccttttaggttacagcatctttaagaatagggacctatgcttaatatctcttccatagcacacacactacttttgggcacacaagttgtactaaaagcctagtgacttgacctggtccacaaggatgaatcctaaatggacttggcagtaattttgtgtaagaaaaggcagaggtatcacacaattgattttacagtgtgtcactctcagtgtagtgcttatgaccaccttggggaatgtgaatgaagcccccactagatttgtctgtgctgtcgccaaggacttaaccaccaggttgctgtttgcagctgtctctgatagtacattggggtctatagacttgagtgtctctatcttttctggctcttccgcatgcttggtggtggttcgatattctgttttgtacttctttgataccgtctctggggtccccttaattgggacaccttaatcggggagcccctgctgcctgggcagggggctgaagtcctgctgctttccctccacattgtcaggattcctgggtgtttcctgggttggagacgtcagcctggcggcatagcctgtgctttccccattacctgatcacgtttcatcagtgaaacgggatgtttcactgaaggcttatctcaggaggcgcctgaatcttatttgaccagaaatctttttggcagttggtgaacttggttggattccagtctgtccctttcattgtcaggacatacccacagtgaggatttgtgtgccaggcgtgtcatttctctgtctcctccagaccccccgccctcatgatactgttgccaaaatcaagggcccaaccccttaccccttaaacatctttgccttttaaattttgtaaacaatgctggaataaaacatttttattataacagatacaagtaatagagatgttgtagcaaagtctgaaggtctctgttttaagtagtgtgtaatagaaaaccaaaataaggggtgggcgaggtggcttgcgcctgtaatcccagcattttgggaggctgaagagggcggatcatgaggtcaaaagattgagaccatcctggctaacacggtgaaactccgtttctactaaaaatacaaaaaattagctgggcatggtggtgggcacctgtagtcccagctacttgggaggctgaggcaggagaatggcgtgaacccaggaggaggagcttgcagtgagctgagatcacgccactgcactccagcctgggcgacagagtgagactccgtctcaaaaacaaaaacaaaaacaaaaattagctggacgtggtggtgggtgcatgtaatcctagctacttgggaggctgaggcaggagaattacttgaacccaggaggcggaggttgcagtgagctgagattgtgccaccgcactgcagcctggcaacagagcgagactctgtctcagaaacaagaaaatcaaaataacagtggcttaaaatgggagttttagtttcttttacaaaaaggaacagattcagcctcttgtgttagcttcctgaggtcaacagagacaaggcttctcctgtctttctgtatcaacatctttagctgtggctttcattttctaagacacttcatgatataaggctggagttccagtcatatcatccaagttttaagcaggaaggaagaagaaggggagaggaaaagaaaaagcacatgctagctagttgtccgtcccatttttatgcagggacttatttgtttacattgctcagcactagccagtcatgtgctaaagccagctcaccctaggttatgaatgccaattgttacatttgccagagtttttgcaagccgattgtcttgagtttggtagcttgaaattggccatagtttttacacaagagaaaatggtgtaagagagagctgtttgttaaccatttacgagacacagctgttcctggctgtaggacaggcgaggaaatgtaatttttaacttggtgcattgccacacagaataaaatcacagtccttttactaaagaagaagggaaagtgataatgaataagaaaacactctttgctacattctccccactttgtattccacagactggatctgcttcccctgtttaggttgttaactcttgtctccttttcaagttatgcaacagtcaacatagttttacatttgtgtttctgcacatgaaccagcatttgtggacaatagcttctttgaggtagatttgctaggtcaaagggtatgtgccctctgcttaactctttataaagaacactcaccagatgtctggtctgtttcctcctaatgtagtgtagtggtgatgagcatggattttggaatcacacatacagggtgtgaacactcattcagacacttctagctgtgtgactttggccagcttacttaacctctgtaagtgtcaatgtttttttccatgtaaaatgggagtgggggataccatctgaccctgcagggttttgtgacgatgaaatgagattgtgactacatagcacttacagcagagcctggcaggttgtaaacccacagtaaatagttagcaggggcttctgctcatggaaagatacacatgtgtgcaacatacagtgagaagaatgaaaacatgaaactgggccttgaacattacatgtagggtcgatatgagttgtagagatgaccagattcagataggaaagcaatggatgtttaatgttcaaactggaaaattattcatttcactgcccctaggggtaggtgtgtaagctaattgatggttagaaaaatcccagagtaaaccaggaatgtctctaattcataagtgtatattataaatatatttaaaatcatctttatgacaattcagttatgtttctttagcatatcagatcctttagttgtggaacttgacagaaatcaacataaatgttctttttctctcccaactatattgaacattgcacagatgtgtagttatttatcatgaacatgcaaatattgatgtccccaaggcccattctttgaatttcaaactgctgttgctatatttggatgttgattaatacgagtctttgctctgacacatagcatgtctgatttcaggacctctgaaagcagcatagagaagaaaagagaagctgaggcttgatattcatagggatggacaataattgaagacgtgaattgctttgggaaaatggcagcaggcaaccaaatatacgagatggttaaggatatgcctagcacagaactttgagcaggtagattttcagtatatctttgctcacttaaagagacagaagctatggagaagaaacaatcacaatgaaagaattattttaacactagtctagaacaagatttcttaatcttggccctattgacatttttggctggataattctgtgttgtgggggccgtcctgtgcattgtagggtattgagccacatccttggctacccactagatgccagttgcatggccttcctcaagttatgatcacaaaaaatgtctccagaccttgctaaatgtctctgggtggagggcagattcactcccagttgagaactactgatctagaagaaaggaaaattagatgatataaagtaaacaacaattatatgctagacatttaacccattgagtccttgcaacaagcctgaattgcagatgttgctaaaattatttttgtggaaagagaggtgggattccaagaagctaagaacatgaccccaggtgggacagatgggatctgagtccaaatgtgatgttcttttccttgtattcctctccttcctaactgtatgacataaacgtaaagtatcacaagagcttatgctgctcctcttcttggtaccaagctcggccttcactttcttatgaaaaccaaaagcagttttcaaagaatcatgcacaacttatatttgggtgattgatctgatttggcatacattttgtggagaacgtgaaccagtctattccccagtggagggctgttgataaacaaagagatatgtagtctttttagcatttcaagggctgtgagtctcctgagaaaactcaaaccaggtccaagaggagttactttgagacaagctatctaagaactgcaatatcctctgtggggaaggtggctttcgttgtaatggttcttgcaaatatttcttaaaccaaatagggttttcttctggggaacactgagatcaactatttgcctatttgatcctcttgcagttaatgtaacaggtttaaaactctggtctcagcagaaggggcttcattccgagctatgggggctaattctgtgcagtgcagtgtggggacagagcatcccactttccacagtttggtgaggcactggcccttagaggagagtttttgggtatacagctaattgttctaattatgtagtagtaaaaatcataccgtcctgtagccgcatatgaatagtgcactagagtgctttcttaaaagagttgggatggggttgggagggtcaggaaatgaagggataaaattattgttaattccacccccttgttataccatcaagagaatagaaaccaataaaagaactaaatgttggcaatccataaaattccataagcagtaataaacaaaagctgaaactgtattgatatacaaccaaacaaggaaattatcattattttttaataaagccatttatcatcaataaataccaaggggaataggaaaaattacaagcacaatgccatcttccataattatacctattaacaatttaaagcataattatgtgagggagaaaaacttttaggaaagctttgtgctgttttctccacagaaaagtcaaattctcacactcccagatattcaggattttctaaacatttcagaatgattggttatgcttgtcccaacttacagtagcttattttctaaggatctttctaataattcaggcccttccggcctctccattaccaggtttgtcatcagccctggagaaagggctgggattcaggaaaaaggtatatatggtaatgatctgaccgcttgctaaatgtcactggtcaagaggactttgtttagtgacaagttgattttgggattccaggatctttttttttttttttttttttgagatggagtctcactctgttgcccaggctggagtgcagtggtgctatctcggctcactgcaagctctgcctcccaggttcacgccattctcctgcctcagcctcttgagtagctgggactgcaggtgcccgccaccacgcccggctaattttttgtatttttagtagagatggggtttcactgtgttagtcaggatggtctccatctcctgacctcgtgatcccccgcctcggcctctcaaagtgctgcgggcgtgagccaccttgcccggccccaggatcttacttattttatctgaactaaccccagctgagcagctgctattgcctaaatgactatgttccaggccttggggttacagaaataaatgaggtactggtgtttgtttgtttgtttgtttgtttgagatggagtctcactctgtcacccaggctggagtgcagtggtgcaatcttggctaactgcaacctccgcctcccgggttcaagtgattcccctgcctcagcctcctgagtagctgggattacaggtgcgtcccaccatgcctggctaatttttgtatttttagtagagatggggtttcaccatgatgtccaggctggtctcgatctgctgacctcatgatccacccatcttggcctcccaaagtgctgggattacaggtgtgagccaccgtgcctggctggtgtatttttttaaccattgaacaccttacattcccaaagggaaacagacctgtatgcctgcagtggcgaacagcagggtgatttaagagtatgcctcagagcccaccagccagcctggggtcatagccctgctctgaagcttatcacttatgggaacttgtacaaattaattaatgttcatatgcctctgtgtccttatccacaaaagaaaaaatagtaataatatctgcttgtaggttgttatgaggactaaatgagttgatatatgaaaagtgcttaaaaaactgcctggcacctggtgagtgctatgtaagttggcagtcatttaacctgacagggtgaagtcctgtgacttggtactttggttctggtatgatagcagtggttggggtattttgatagtttgggtctggtgcaatagcaagctcgtggtcacggaaggctctgtgtacaagagaatgactgtcctgagtcttaaagggtgagaataataggagagagtattccacacagggaaaaccacaggagcaaagggatagcatacagaaacagtatgatgtgcctggctctttataagctatactccatcttcttagagcctgacacaattgagctggtggcagagagagagaggaggctgcagtagctggcagagtctggtcacagaggcttgagtttttcttgaggacaggagggccctgttgaaggatattcactgtgaaggtgatggttagtcagatttccagtctagatccattaggaaagcagtgtactgggttgctctaacaagtgagaggggagccgaagggaagggttaggggcaacttttggaatttttatgattcagacttctacccagtaggacaatatttcagcagggttatgcatgtttgttggaaatgaacacctggactgattgattctcagtttaattgtggtagtcattagtgctgtttggcaaatatcccagttctccactttcaggcacatgtataaacaaatggtaggattgtattttctggtccccttgtgtgaatggggtcacatgaatagttcaggtccaggagttgtaagaaaagtgatatgttactttgtaatcatatcactgagttgttgctgaaagatctttcagagcttgctcttttccctctgtcacagtgactagcatcgttccagatagagttggctccatcagctgggtcctgcagtacagatgacatggagcagaactcccagctgactcttgattaacatggagcaggagtgagaaataaaccgttatggtttttaagccaggggtcagcacactttttctataaagggccagatagaaaatattttaggcttttagtttatggaccatgcagtctctgtcacaactcctcaactctgtccccatagtgggaaaacggccataggaaatatgtgcacacatgggcatggctatgttccaatcaacttttgtttacacaaacaggcagcaggctgcagttgaccagcaggctgactcctacttaaggcactatggtttgggggctatttgttaccaccacataatcaagctattcctgactgatactttgcccaactagcttttctttttaaatacaggtaaaatttacatagagtgaaatgcacagatcttatgtgtgttattcaatgatgtttataaatgatgctatgtgatgtttaataaatatatacatattaagtatatgctttattatgtatcataaaactatcccattttatgaatatagaattcattttcttgttgatggaaatttggactatttatagcttttggtcattatggataaagctatgagcattcatgtgaaaatctgtgtagatctagatttttatttctcttggataaatagctaggagtataactgccagatcctggagggggtgggtagatgtaggtttaaatttatgaaaactggccaacagtttttcactgtgattgtgccatttatacttccaccaggaatgtttgagagttctacctactctacatcctctccaacagttagtgtcgtcagtcttttgactatatttattctattaggtatgaaatggtatctcactgtagttttactctgtgtcttcctgatcactaatgatgctgaatgtattttcatgagtttactgccatttgtatatcaacttttgtaaacagactgttcaagtattttgaccatttaaaaaattgatttctggtcctaagtcctttgtcagatatctatatatctacatcctatgtctatatttatttatttcaaatttttcttccagtttttgagttgccctttcacttcttaaatggtgccttttgataagcagaaggttttattttgataaatacctatttatcattttttttttttgttaatgctttctgtatcctaagaaacctttgccttccttggggttgtgagatattctctatttctttttattaccttgagttttggcttttatgtttaggtctttgatccatgttgaattaattctcgtgtaggagagttaagaattgggattctggctgggcacagtggctcacacctgtaatcccagcactttgggaggctgaggcaggtggatcacgaggtcaggagttcgagaccagcctgaccaacatggtgaaaccctgtctctactaaaaatacaaaaattagctgggtatggtggtgcatgcctgtaatctcagttatgcagaaggctgaggcagaagaattgcttgaacctgggaggtggagttgcagtgagccgagattgcaccactgcactccagcatgggcgacagagcaagactctgtctcaaaaataaataaataaaataaaataaaagaagaaaaagaaaaagaattgagagtctgtgtgtatatctagttgtttcagccccatttattattttcaactacactcccccattcaattattttggaaactttatcaaaaatcagttggccatgaatgtgtgggtctattattgtgttatctgctctgttccattgacctatttttctacctttatgcaattaccacactgtcttgactactgtagctttatagtaaggatttaaattaaggagtatgagtcctccaaatttgtatttcttttgaagcatctttcacctgttctttgggtttccatataaactgaggtcctttgggtttccatataaattgagaaccaccctgtcaattaaaaaagcctgtggggttttgattgggattttattgactctatgaatttgtggaatgttgatatcttaagtttttcaatccataaatgtattacatctttccatgtattcaggtgttttgtgtttttttagtggaggtcttgtacaactttagttacttttattattactttgtttctgatgctattataaattgaattaaaaaaatcattttccagttctttgcttctagtacatagcaatattgatttttgtatattaactttgtatctagcaaccttgctaaagtcacttactacttctagtatttggtttttaaattcatcaggaggttttatgtaagctattacattgtctagaaataaaaagttacttcttcccaattttatgtatttttttcttgttcttgtcttattgccctggccagaggttccagtacaatgatgaacagaagaggtgagaacagacatctttgcctcattcttagtattagaaggaaagtttttattattttatcatatgtattatctttgatgtagaagttcttacatgccttttatcaacttgaggaagttcccttatattcctagtttatcatgaatgggtattgactttttctgatgcttttcagcctctattgattatatgggttttctcctttgttctgttattaataatatggtaaaagcaatttgttgattttcaaatgttaaactcaccttgcagtactcagatgagcatcacttggtcatcatgtgttatcctttttgtatatttctggatacaatttgataattgttattattttttgagatagagtttcacttttgtctcccaggctggagtgcagtggtgtgaactcggctcactgcaacctctgcctcccgggttcaagcgattctcctgcctcagcctcccagttagctgagattacaagtgcctgccaccacgcctggctaattatagtatttttagtagagatggggtttcgccatgttggccaggcttctgttgacctcaggtgatccacccgccttggcctcccaaagtgctgggattacaggcatgagccactgtgcccagtcaatttgataatattttgttaaggattttttagtctatgttcatgataaaaaattgtggtaattttcttttcttgtaatatttttgtaagatttagggataagggttatctactggcctcaagatgaattggaaagtgttccttcctcctctgtgctctgaaagagtttgtgtaattttgggttttttttcttaagtttttgatagaattcaccaatgaaaccctttgggcctgtcagttttctttgtagaaggttttaaaaattattataactttaatttaataaatatagggtgactgaaattttctatttcttcttgtgtcagttttgttaagttaatttttcaaggaatttgtttacctaaatttttgaatttattcgcatagaattatttatagtgttaccatattatctttttaatatctgtaggctctgccattataccatttttcatttctgaattgttattttagaatttttctcttaactaatcttgctagggggttgacaatatttttagcagctttatttgaggtacaatttgcattacataaaattattttaagcatgttcttcagtgatttttttaaaataaaatcatatagttatataaccattaccacaatccaatattagaagatttctgtcacccttaaaatcccttatgtccatttgccgtcactctctattcctacccccaactctagataaccaaaacaagttactgttacaattgatttgctttttctagacattccatacaaatgaaataatacaatatgtggtgttgtgtgtctggcttctttcgtttagcataatggttttgagattcattcgttttgtggcatgtatcagtattctgttcgcttttattgctccatagtgttttattgcatggatatagcacatttagtttgttcatttgtcagttgatgatgaacaatgctgccataaatattcacatataagtcttgtgttgacatatatttcacttcatttggatacatacctttgagtcaaattgctgctagactgaattctaaaatgactgcatcttacatttatgccatcagtatatgaagattccaatttctctacatccccccaacatttgttagtgagtatatatttttattttagccattctagtgcatgtgacagtgtatttcattgtagttttaatttgcatttttctaatgactaataatatagaacatttccatgtgctaattggctactcatatatctttttttcaaaaaacattcaaatcctttgccccttttaaaaattgaattctgtttttattactgagttacaagtgttccttgcatttttgtggatataattcctttataaagtacagtatataatttgtaaatattttctcccagcctgtgggttatcttttcatttttttatggtatgttttgatgtgcaaaagtttttaatattggcaaagtccaacttaaccactttttgcttttatagataatgcttttggtgttacatataagaaatccctgccgaggtcatgaagatttctctcctaagtttatcaatattattaatatttcaaaagaaccagcttttgcctttgttaattttctctattgttagtccaatttttatttcattgatttttcttctttttacttactttgctatttttctagcttgttaatatggaaacttgtgattttaagcttttcatgttttctaatataagcatttaaagctataattttttctcttaactataatttgcgctgcatccatggattatgctatgttgtgtttttattaatgtaacattaaaaatgttttaaacattttcttgtgatttctttttacatccctgatgttttagaagtgtatagtttaattttcaattatatgtgttttctagatatcttttttgtcaagttctgactttattctattgttgaccctgatctgatcactatatacattacatgttttgaagcatcactatgtgctccatgaatatgtaaaatggttgtcaattaaaaaaacttaaaaagaatttaatttagatatttattaggacttattttaattatcattatggcatatggtctatgttcatgaatacatcttgtgtacttgaaaatgtgcattgtgcaatttttggatatagtgttctaaaaatatcaattagattaatttattcagtagtgtgtccacatctacagtatctgtactggattttgttttattaagagtttctgtgagttctgagagaggcatgtttattctttatccacaggcatgtttattctttaaccacaattgtggatttatcaattttttcttttacctctgtctagtttttgtgtcatctgttttcaaactttgtatttaagtgcacacatatttatgattcgtatgtcttcctgattatcatcatgaaacaccatgtttaaacctctgatcatagtctctgcctcgaagcttactttgtccaatatcagtgtagccataccacttttttatgtgtactttttttgcagcctatatatgttttttatcctattactttcaacctaatttggtatttatattttaaatgcatccttgttgattgcatttagttggatcttggtgttttattcagtctgataatctttttctttttttttttcttttgaaatggagtcttgctctgtcacccaggctggagtgcagtggtgcaatctcggctcactgcaacctccgcctcccgggttcaagtgattctcctgcctcagcctcccaagtagctgagatcacaggtgtgtgttactattcctagctttgtgtgtgtgtgtgtgtgtgtgtgtgtgtgtgtgtgtgtgtgtttagtagagacggggtttcagcatgttgaccaggctagtcttgaactcctggcctcaagtgatccgctcaccttgatggagtttatgaaaactttttgatcagcatgttgtttttttcccaaattgaagggaatttttgtccgttatttgttcaaatactgtttttgccttattattctcaccccgattacacataaattagatcacttgatatgtttgcacatttgactgtaattctgttattttgttttaatcttttttctcctctcatttcttcagattggataaatattttgacttcttttcaagtattattgatctttcttcaagttgagtggtccttttttcccccttgacatttccatttgctgttaagaccatttatcaatttcttcttttacctctgtctagtttttgtgtcatctgttttcaaactttgtatttaagtgcacacatatttatgatttgtatgtcttcctgattatcatcatgaaacaccatgtttaaacctctgatcatagtctctgccttgaagcttactttgtccaatatcagttgtagccataccacttttttatgtgtactttttttgcagcatatatatatattttatcctattactttcaacctaatttggtatttatattttaaatgcatccttgttgattgcatttagttggatcttggtgttttattcagtctgataatctttttcttttttttttttcttttgaaatggagtcttgctctgtcacccaggctggagtgcagtggtgcaatctcggctcactcaaacctccgcctcccgcgttcaagtgattcttcaagtgaatttttcatttcaaatattttacctttcaattacagaattttgtttgatgcttttttgtagtttcaaattttctgctgatattcccctattatgactctctttccttgaggttcttgaaaatatttattataacttttttaaagttcttgattcctcattcaaacatttgggttatctcaaaatctgtttctgttgcctgatttttcttttgactgtgagtcacatttttatgtttctttgtatatgtagcattttccattgcgttaatatgttgcaaggattctgaattctgttatctccccctgaaaagttaagacttctgttctagattaatttttgcacctactggctgactaccttgaacttgggaaagtttgtttgtacactttgttagggaagctctgtttcaattttgcaattgatcttagtgtaaatttgtaatcctaaggcatacctgcactttaaggtgtcttccttcaggagttttcatgcaaagcttaaaatatttaccaagcgccttcaccatgtcagaattaaaactccagaccctgactttttaatgatggacagcttatgaaatatttggtagctttttcagcctttcacctgtttgtttctgccagactacttggacttccctcaagcatctactgttcagggataagcccaggatttgtgaggagatgtatgcagatttcctccctctgtcacctgttctgttctggtatttcccttcacaatctccaaccgctttggcatccctgacatctggcttttcaaggcagtgagactgaagctttttcttgagttctggctgctgtgtccagtgcagactctggagtggcctcaaggggaaaagccatttaaacatagatatcacccaatatggttctcttctttcaaggccattggattgtcttctgtttctgtctgcttttggtagctttccagtgccttctattagttgtttatatttttccaagagtttataatttttaactctttatgcatctgcctcctacatgagggtctagggaagagatctccaggtggaggaaagagcaaatgagaagccctgagcaggactgagatgaatgagctggggtggaagctggaggcccatgggctggaatgaagtttacatccagggatccctctaagccattgaacttcggcatttgctctgagtgagagataaggagctgtcgaatggcttccttagagaaaaaatgttatctaattttttgccttgtactctaggaaggcaagagaagaagcaggtagaccagttaggaggcagttatgactggtaagagatgatgatgattgatctgggtcaaacaaaatgatttgttgagagcttcgtatgtgctgtgtatgatgctacccacctaagctaagcagctgtgttcccaatctccttcttgccttggcaggggacacagcttgaggactctcttgctacatagaaaaacacatgaggctgagcatggtggctcatgcctgtaatcccaacacaggcatgctgaggcaggaggacttcttgagctcagaagttcaagatcagcctgggcaacacagggagaccccatttctacaaaaaatttaaaaaattagccacatatggtggcgtgtacctgcgatcctagctactgaggagcctgaggtgggaggataacttgaacctgggaggtttaagctgcattgagctgtaattgtgccactgtacttcattctgggcaacagagagagaccctatctctaaacacacacacacgcgcacacacacacacacacacacacacacacacaatagggaaggaaacttgattaaggaaggccggtctagcataaagctttgggtgaaggatttacttgtgtgtgcatatagccacatacctagctgtgtaagtcattacaaatgtcacctggctaatgttcattaatgattagctaattataaagctgccgttctgtccttggactgatagctggtttgttttacagaaggcagtatctttggtagagttgctttatcatatcaaaaagggtagtgttgttttttttttcttagcaatagcttcaagaacgaagaagattaaacaaacactatcgaatgaaagaaccaagcccagtacctggcacataataagtgcgtagaaagcattacttgaaattagatttactgcttttttgattaaaaaatactcttccaatttaatgtcttaagggttctctataaagagtacaaattataagttaaataaacactatattggaccaaaatcagaagtagaaacttgcataccttctcttgatttgttaattactgagaagttatttgtggtcttgacctgatgcatgcattaatacattatgtgtgtgtgtgtgtgtgtgtgtatatatatatatatatatttttttttttttcttagctccctttacttctaccttctctctttcactctctccttcctcccattcctcctatcatttattgaggactaaccaaatgttctagtcactgttctggcacttgacgtgcagagcctcctggtagccttcagtttagtgcagtgattgagagcacagcctgagagctggacccatttgcattccagcccagcctcagccccacaagctgtgtgatcagaggcattttaccaaacctttccaaggcttggtttacttatctgtcaaatgaagatggtggtgcagttttcaggctgcaagtgagtgtgtaaggtcacttagctcataatatggtgacacatttcacaggtctcatgatcagatgaggaagcacatagtatcattcggccttttatacaggtccactggttacctgttcttggtaacagggtgaaggctggggtaacaagtcctgccgggagactgtaagaggttgcatggcactgtgggtcagagtagcatggatccagaccgcctgcatgtacattctggctctgccacttattagctgtgtgccattgggcaaattatttaacctctctgtgtttcagtttcctcacctgtgagatgggttagtaatgctacctattgcatagaactgcagtgaggatgaaatgagttgacccatgcagagtccttagagcagtgactggcacttagtaagctgcatagaagtattgtctattaatacttgcattgattgtgaaacataatttagcattgctaagaggctgtcttttcaggagcatggagtccaagtgcccatttcctgtacatttggctcagatacccacccctaaccactgcacgcagtctcttttctgtctgagtgggacacatctctttcccctgcagcacaatcactctgcctcccgctccgtcctggtctgccatctgctgacccattcgctgctcctgtcacgtcaaagatagcgtggcctttgtggagtgcccaggcagcgtgtcatgtcccagcgctgttgtacatcttgtttcagagatattttgctgtaatgttctgtgaccttttccattgagtgaggtagttggaaaggcactcagtaagggaaaattgagctgttttattcctccccaaggaggctcctgtttcctttccaccattcatttgaaagctatcattttcttgattttatagctgaaaaacaccattgattcactgggtgttagatgctaagagttctcctattgacatgcctattgacagttttcagtatattctgcatctaattatcactcttggctaaatgatacaccttgtggacttgagcgatggagtcgatagctctcaccacattgttctagtgctgcctattgagcctggtgtcacggcgatgtgatttatgtgatcagaaagaaaattcctgttggtgtgctgcataattaaagcaagcgcagagtgactggtgacaaaaaatcaggcctgccgatgtcaccccaaatgaggagagatttctagagtaagcagctgtgacagtgaagaatctctcttggcatcttctgctttgcaattttcaagggttcgattttcctcctggccctggctgagggctcctcttctctcccttcctgctgcattgtggtcagagcttcagtacctgtgtgctgccattccgaggcctgggccgtggggcttgctctgggaggggctcattgttgcagacaggggctgttcatagaatttgggctggcagcagcccacatttgcaggtagggaagatagatggctctaaaatggcttgtcctttgtataagctgttttgagtttctgaggttgagattaaatgttgggaaggccattttccctgtgcatgagaggagtggtccctgcgttgacatggcgggttctgagaggagttgatggtggtgatgctggccagccttaggcaggactgaagtgcaggtggctgacaggtggcaaagactgggcatgtagtaagcaaacaaccctggtgtgagacagtgttccctgtgaatcccaccttctgcctcaactactcctttaccaacactcttcccagagggtcttcagaagatccgcgcagtcaaggaccttgccttcttcaatgctggtgtggcgatgattttctgtgaggccagagtcaagtgatctagcctccatagactagtgtgttctccatatctgaagtgaacggggttccttttagccctaaagtactgtggcttagtgagttggggcttggaataagggttggagaaagtaatggtgttcatctgagaggtcccctgaaggaattcaaaggccaagctgccactgcctgagaggagtgcttcgtgtgtgctgctgatctaagatgtggagcctctggcttcgtatggcactgaaggaaccttggaggttagaatatgttagcgagatatttaatgagacatatgaacagaacatctgaatcaagccaacagagtagacatttccaggcacctgagttgggcaatgaatttggcctggtggctagcaaaagtcatgagtagaatggggattgggtgttggtgggtggtttgggccatgcaaaggagtcaggattctgagattttgggtagctgagattgtgacaagagggacttttgaggtcagtgattctagatgggttactttcctggaagccatatgccttgtgtgggcactattactatcaatttctacttaatgaacctctgtatgtggcacttttggggttcagtttttccccatgcacaaggccagagagattttgtgacttgagttcccgttttcatcattgggattttttaatataaaagttttgagactactcagtgttgtatttttgaggatatactgatactttataattaggggttgtgttaggccattcttgccttgctctagagaaatacctgagactgggtaacataagaaaagaggtttaattggctcatggttctgcaggctgtacaagcatgacatctgacatctgcttggcttctagcgaggcctcagggagcttttactcatggcaggaggcgaagtgggagcagcgatgtcccatggcaaaagcagggaaagacagagaggcaggggggtaccacacacttaaaccacctgatctcatgataactcttactcacttttgagaggacagaactaagctgtgagggatccacgcctatgacccaaacacctcccaccaggccccacctccaacactggggattgtaattcaacatgagatttggatggggacaaatatccaaactatatcaagggcccatagtgctttgtcttcgacactgagtgaaccatggaatgcgtcagcattcttgagaattcatatctcttgtactttgctttagttgttcatgtttatttatctggactagttctgaaattgtcaatgattctgggtaaggagagatattcctctgtaactgtgaaggacctttgaacattctgataggattaatgattttcttccagtgtgtctgtaataatcactaaacatgtctctgtgaagactccttagtacattaaagtattgttaatgcaacagtaccaccagaagactctgggtgattgatcgggataaagttgatcatctgtctgttaaagttcttttttttttttttccattcttgacaagtggttcaacttagaaatcccgagtaccccttacaaattgcaggctacctcaatcacctgtgattacagaacatggttggtttgctgtgtgctaggacccccatgtcttaaccacagttgatttattttaaacactggaaattgcaaaaaaaaaaaaaaaaaaccacacacaaaaaaacctaccttgggagttctttgaccccacagttcttcctattctatgtcttaggctcttaaagtgcttctcctttctgcatctgtctttccccaattcagaaggtacttcccgctggcagaggcatcactcagtaaatttcagggtagcataagaattgctctggttacgttgatatataatttaattttccccagactgcctctggcctctgcctgtttaagctctggaatccctgtggggggtgagtgtgcagaatatgttctcacctctcaattcattgtgactttagctggaggtcggtcctgttgctgttgttgctctgcatcccagcaagtagaagcagcatgtgagatggagtgagcagtaggcatatggccagggtttgtgtgtacagagggatgcagcacagggagggaaagcagcattttccctatgggactgtcaagagaagtcgagcccttccatggagcacagaggcacagagaatcagacagggcatgggcctgggcagcctgaggcctgcctggtgagcgatggggcaggatggctcacatcgcctagccgttggcaaagggtctaaaattcagtgcttcccccaagcagcctagctccttcaaatggcaaattattatttttctgttcttttctgtcttcgggattgtatttgcatctcaaatgtgtgtaaagggaattttgcacattcgacaaacttttactttaaaggcagcaggttggagaaaggagctccatcacattaaatgctggctattgtgcttttcattcagcttgacgaacagtggccgaaaatggcaggggattaaactgatgtaatgacaagaattcatataagaggctgtgggaatggggcagaagaatgctgaggctttgcagtattatggtgttctttgatctgccgtagatggaaaacataatgtacctgtatttatgttgattctaaatagggagtgtgtaaacagaggcatgtcattttccctgcagccttcaagttgaaattacacagctaccatttctgagcaatggacatatttctgagtaatgagttaaatgcagtttttgaatatttggatcttattgtacatcacaataagagcatttttgttgctcaattgggttcctgttacagaggcacacagtatgtgggcatttgtggattattcatttgctaaagggcattcttcttatttttaggaaaattcacctttgtcttggggaatttaagcaaaaacaactgcaatcccgaatagaatgaacacctccttttttcagcctcattctttagtgtgggagagccgcagatgagatgtccctgccttctggagaaatacatatgtgtctttcatctgggaaatgtctttctgggacagcaccagctggaagatgtcacctgggatgaccaaagacttgatcaattgacaaggggagcatcaaaagtggctgagaaccatttatgtttactgtgtttgaaagcactttggagggcagggcgtgcgtctcgtgcatctgtataatatgaaagcatgttttgtgaggcacatcttaacatatggttccagaaaaaggaaggtggtgccctgcactcaaactttttcttttctatacatagctagaaagtcatctttctataatcatttgaataatgatgttcacactttttttgttgttgttgagatggagtctcactccgttgccaggctggagtgcagtggcgtgatctcagttcactgtaacttccgactccttggttcaagtaattctcctccctcagcctcctgagtagctgggattataggcatgcaccaccatgcgcagctaatttttatatttttggtagagacagggtttcaccatgttggccaggatggtcttgatctcctgacctcatgatccgcccacctcggcctcccaaagtgctgggattacaggcatgagccactatgcctggcctgatggtcatactttttaaaggcttcatgaggaatttccctaatttcttagaatactgctttggtcatctccacaattatggtaggaaaatgtggactcaaggccatccacagttttgactgactctgctctgcacagaagcccctgggccagaatgtctcacctgccattagttcccatcccagcctcacatttgtgcctctatggaggctgtgccttctactagaggggcccacccttgctggcttctgcccactagctgctgcccatcctctgggggtcagcttgttccagctcccccaccaccttccctgcaggcttcatagccacctccccagagctgagtgtgtcctgtcagtagcactcggggaggatcagccaccttgctgccaggtggcctctgcatctcacctgttgcactcttagcgtcagtgatggagggtaataacactaatgataatggtaataataaaatcatttattcagcctgcttttactgattgcctgttgtttgctacgggtgaggatggagtggtcatcaaaaagcagacatgggccaggtgcagtggctcatgcctgtaatcccagcactttgtgaggctgaggcaggcagatcacctgaggtcaggagttcgagaccagctgatcaacatagtgaaaccctgtctctactaaaagtacaaaaattagccaggcgtggtggtgtgcacctgtaatcccagctactcgggaggctgaggcaggagaatcgccttgaacccaggaggtggaggttgcagtgagcctaggttgtgccactgcactccagcctgggtgacagaatgagactctgtttcaaaaacaaaaacaaaaaaagacagacatggaccctggattcatggcacttcatgttccagtgggaaggatagaccaaccagtagtcactcacgtcagtggaaggatgttgactgacaggtggtgcgtgacactgtgagggcttgcaaaggggcatgtgaaccattcaggaggtcagcgaaggctttcctgaggacagaaccagctacataattttcagagtccaatgctaaatgaaaatgcagaggtccttgtttaaaagttattgagaattttatggtgagtggtggcagcagggtattaaatcaactgtggggtccttctgtgcagggggccttgtgtggctatgctggttgcattctcatgaagcgggccctgcctgaggagtgacatttgagctgagatgtgaggggagaagagggtaggaagatggctccaggtggacgaaacagcatgagcagagtctctggcaggaaggaggttggcacattcagaaatgatgaaggggccagcgtagctggagttcagagagcaggtggggcatgacgaggccagggcagtagagttggtgatagggaaggcaaagcagaaccctacacagctacttaagtgtcctgagcagggagctaaagacactgggtttggattttgcagtcacactggctgcagtgtgcagggcagactgggtaggtagcaggagcgaaagcagggctgttcggaggatgtcagagctgtccagttgagggagggcaggggctagtccagagtggtgccagtggagggagaaggtgtgcaggaatattgaggacacccaatattgggcatagtggagctgaaggaacaaaagacgccaaagatgacatctagattctggctttgaacccctgagttgaacctcatgaaatcaccaacattctgccacttttgatctgcagaaataccaatttcacacaacttgttctgatagatgggtggttggtgggacatccctttacacgggaatgcttagaggatcagaggggtttgctttgtttttgctttggtggtggcagctatgagagacaattacaaactgggttctagacacagtgagcttgaggtgcctttgcaacctctaagtgagggtaaggaaagaggtggactatatgcatctggagcttagaggaggtgcctgagcaggagatacagttgttggagcagatgctgtatagacaccttatcagggttaccctgtttaaaacttgcaaacatcctgtaaagaatgtactattgtattcagtttccagatgagaataatatggctaagagaggttaattaacttgcccaaggtcacacagccaccaagtggaggagctgggtccagggcccaagctcctaattactgtgcctactgccttctcagtggtttcctcacatcaggatgcacagctctttgtactgagtagatccttaggaattccttattggataaatacatttaaaatatttggtggaaataatgatatcttcccttcttaataggagattcttgaaagaggtcccaaggccccaaagtgtcagcaaccatagatggaatttacatggttgcctgtctggttattctcatcacactttcctctccttcatgggcaagctccacccccaccccttgctgaggtctgaactttgtagagagcctcagttgtggtcatagcaacatcttgcagatgaatccattaatgataagttaggctcctcctctagtattcttggggtgaattttataggattttgacattttagggctaacagctgcctcaggtgctgctgcgctccctcgggaacccctagggcacattactaaatcttgctgggcctaggcacggactcaggatccttctcaacatggtactcatctcattttaggactgagggcactgagatccagagagatgttacttcaacaatcagttaatgctagaataaatctgtttgcttattaaatcaaataaagtagattctagttcagtccttttacaggtaaggatgctgagggcccgagaggcagtgacttgctcatttctggtggagatggagctcatgctcccattcctacctcccatctagtcagtggtccctccttgggcctggaacacacggcaaatccacttgctgtgttggctcattcagcaaaacggagcacatcttgttgtggacatgcatttttcatcagctgttcctctggaacttccctcatcatgcttgtggacagtgaattgaatgatgtgaattatactttattaggattgccttttgatacaagtatttcttttaggctgctttgtgcccgctgtgatgcccaccctggattttcttccctttgcccttgacgttgaagtgaaacatattgtttccctttagaatgccattaaaagtcgatgatgacctttacagtgactaatagtttctaaggggctttaattgtgattttttttttttttttttttttttttttttagcagagcggcattagtttgcttcatatgtcttttgtatcagggaatcaataaaaactcctgccttttgttgatgctataggatattttatgccgatgacaagggatttgatttaatattctctttaaataagatcaacactgctgcagttataaactcttcgaaaaactgtcaagcccgtcaatgtagcatgaaacaaaaagttagcagcctggtataaattagcacgtacaatgtgtctttgggaagggtggtacatatttacgattgtgtgttaaaatatatatatttagagatttctttctgctctttcgaccataagtgggaaatgcagagaggaacatttcattaccaccaccttccaaaccgcaaactttctttgccagttaatgattttctggggcaattctgaacgtggtgacatgatataaacaggtatttatgatctgtgatacaattcttcgtgagtatggatttatagttaaatggtgcagtgggaatccagccagagattattgacagagcttctagaatccatattttgtctgtttccattattcacatacattttcttttgagttctgattatctgtgtagtctgtgtttcctggtttacttgagaggtgagcataagactttgaaattcaagggcatgtgttctatatgcttgggggccatatgttctgtacatcttgaccctgcacctcttccccaatatcttgccattttcattcaacagcgattaggttatgtgattagatcattccatctctctttggctttgtcccagatgaaccaaagtaggagcagagctgatggacaagaaatgtttggggtgagcacatgggtacagtcgtggcagtgtcagagacctgggagagtccagagcttcctagatgagagttacacggctcctgggacaaagtgaggctttttcagaacagcagcagacaagtgagggatcactcacgggcaatgtggatcatgttagcaggataggaatggataggcaagagtctgaggggcggcaaatctgagatcaggtgatccagagagaaggtctgccttgcacactgggaagattgcagtggagctgctggtggcatcaggagagccctgggaggtcactgcttccatgactggaggaggtccactcagagttgcttccagtgccgacccacggggagaaactaccagaccagagtttcttgaagtatcttccctggagggtctacatcttaatcacttgggatttccatcagaatctgttgtgaggaagctgagaatctgtattttataaagctccccagctgatttccatgcaaaccaataaagctttgaaccatcgcttcacacttaaggagtctttccaagttagaacaaacttaggtctcctttcattttttccgaaagagtttgggtttatatctggagagagagtgatgctctttggacgacgtgggacagatacgcgttactccacaggtccatttgagaaagtgatatttgccagaaaatatacaatatatgttttgtttaggttatatttgttgtattatagatacaactttacatgcagtttcagatatccaaattccctgatcgtgaactccctgttgaaagctcttggttggaagacagggttatattaattcttgctacctttcactgattaccctatgcttgctctaaccatttgtgttgaagacaggatcaagatatgacctctagttactgtcctagaaaaatctctgctgggtcaaaatgctgaatcttcattatgctaataaacaccttgatgaaaatcgaagcatgtggtccccattccagccaataaatccatttgtcactattggaaagcattgtaattcttgaattcccatttctgctttcatttgaatgtttgccattcttccttttgccttagtcctacatatgtgaaccatttaggaatatgatttatgcaggaggaagagtgaagaggttccttctggacactgggcccttgaacttgaagatcctgcttttctgtctggaagacatggccctaatatgcagtggctcaccaaagcaggtattgatcttgttttcttgagaattcttcataggcatgagtcactagccagaccacacatcagctgtcatctgcccaacatttttgtcattttggaggagatgagtgcaaactgagaaagtctctctgcttgtttccctgggtggtacttatgctgtctgaatgttcctttctggaatttattagttagtgattttcttttcaataaacacttgtagcatacatactagtgtgctctcctaaagggggaaataatttggcagccttatcagcatgttattggactttcgttttgtttgtaatcttaagacacctttttcccactcagccattcagcaacattttcccttccccagccttggccccgccacctgaaacattcatgttcttcctctaagacagaataccaaccaagtgcaggcagccggttgacacaaccagatcaaaaggctttgaattctgaaaatgattcccctcttggtatcaagcccagtgataaaagcaaagcagttgtcatcttgaaaacagagctgtatacacagcagagcctttccaattagcacacttaagatgcgtgttagaaatgatgggaagtgggatgttacagagtgaaatgcaggtaatagggctttaaattttcatgtttcagttgatttttttctattgcagttttaagaaaatcgttgcacattattgaaactcctaagtgcatcttaccattgctcttctgtttacaataatatcttccaaaacaacagaaatgttggtcacaaaaaagcttgtacccattggttttccaagtagaggaagaataatctattattcaaaatttccctaccatggatgaacaaatcagtttaggtggcttttctgcctgctaccagccaactacttcaatggaatccctgaactgaacaacctggcatttttcatgttcactagactcaggcttagaaatggagcctcctcacaggatccacacaggcatatggagaaattaaagccaaatgtccagcaaaaaccaatgggtgtgttacataaagataccagagttatttaaatatgtaacttactcaccagtatgtaggctgctagaagtcaggggaaacctattaattttgaatctctggtgtctagcatggggcagcatagagtaataattacagttgtggtggatgtgattagtactcaccaatatttccagttcccctctccttttgtgtacatgggagaattatgctttcctttcctcttgaagtgagatgtgccttgctttggtcaaatcagtgggagcagaagtgatttgtgtcacttctaggtataagcatttaagacctagtaaatggcccttctgttatggtaaaccctaaagccttttattgagaaaggagcattataaaatgttggagactctgttagtttaggtcagtgaataactacagtcaccagagcccctttccaccagccaacccacactggacatgtagaatgagagagaattaaccttttgttagtttaagccactgagatttgggacttgttattgcagccaaaataatctaacatattttggctgatatactaatgaacatttattcagtgctgtgtgcttcaagtatttttatgtattaattcacttaatcatctctataatcctgtgaaaaagatactgctgttatcaccattttgcaggagaagtcacatgggtgatgagatgtttagtcacttgcccaagattgtatctctagtaaggagcagaactgaaatttgaacctaggcagtctggtaaataataaatggtgaatgagaaagtcaagatcagagagtgctttgtgatttgctgcagctatgatctttcatgtgacatcattggaggaggtaccggtcagtgtcatctatcccagatctctctgctacctgtcatttttccattatggtttcttacttttaggtcttgaaagttttcggctttctatctgcctatataattcacatagtgctatggtggacaacactctgtaatggtttttggaaagctaggtactccacaagagtgcatgaagcgtcagagaggaggtctagaactctgggagagctaaggagcaatcaaggactagagctgccctttggctgagggttccttcattaagactagtgactgccatgttgtgctgtgagcccagagaagacgagcatcctgtgggagttcccacctgtggagttcatccagcctttccaagcagtagtgggagataggatgactgtgggtatgctcaactgtttgttgcttccaaaagaagatgagggccaatttcccaaaagggtaaaaggaaagaagttgtggcatagtctgagaggctcaagaggtttgattttgctcctttgttctaatatggtttggtcaaggtggtttggtgaagctttagggaacttcttattgtaagtaacagaagcccattcaatgttgtttaagcaaaaagcaggatttgttaaaacaatgtaaaatatagggtcctcttatggatccccaatcctggatgtatagcgagtcctcatggaggactggaacaagaaattgggaagctctctggaggcacagctccctcttcaacttttggaggttatgcaaaacttctctcaattttctcagtacatttcagctcttctacctggttagtattctctgctgtcataggttcaagggcaaacatggccatgatatagtacctgagcttatggatcttcagttcaaataaccatgaaaaagtgattagaaactttaacttccaattcaacaaactgggaacagaaaatttgatccacgttgcatggtctactcctggcctcatcatcggtagtggtgggatcatatctgacatttgttcagcagcatatgttgattgcctaggatgtgacaatcactgggttatgtgctgaggatgtggaatatgaataaggcagtgcctctgtcttttagattctcctgctgcggaggggcatgtgaggccagaactcaacccaagggatccaattggacccatgcctaacagttagaaggagccacattttgttttaatataaggaggttttaatagctactattgtgagatggtgaactcaccgatgctgaaattatttcatctgagataggatgatcatctctgtaacaggatgttatctgaataattctctcctcttccagcagattagaccacatgacccttgttctttccaactctgtgattttaaaataaaccatgtgatacagtctgtagaaatgaagggggaaaatatgtgctagaagtggtcagaaaagtctctttagagtaatgaaaacttgaatttatccctgaagaaagagaaggcacatagacacaggagaaacaatatattcccagttggcatagtgaaatatgtaaagacacaaagacaatggatgtggtatgtataaaagagaagacacacatctactttgtgtctttaagaagctaaaggaaaataagcgtttgggagggtattggaatgatacaattaggaaagtggacctatagctatagtatcggagaaccagagggaacttgttttaggtagaatattatttgctgtaagagaacacccaagagaaagtgacttaagcagggaggatatttcattatctcacgtaagagtaagactgagttaaagaattaagggattgctccagcagatgacatcagggaccaagactctttccatcttttttctctgcccattttaccatcttggcttggtgcttacacttgtttcctcatagtcacagcctgagcatgatggttccatgaattgcaggtggacacaacaagatctggagaagtgagagggatgtgtctttctgtgcatccctttttatttgagatatcctttttcaaatgtcctccagaaaatgtctgtttgtgccccattggccatggttagtcacatacccacaccttagagttaggggagttagagaggaaggcaggctttgctagtaatgagggggtttgtggggtaagagttgtggggtcagccactagtggtattgctcccagccagctcttgcaggtcatcttgccccatcacttagtttcactgataaagataaatcataactgtcatatgtcaagtatctgttatacactgggaactctgcagtattttgtttttactcttggcagcaacttttccaggtagatcatgtcattctcacttactgatgaggagactgagtggtgtgtaggtgactcagatacttagtgcctagagagatgagatcttatttgaattttagaatcacagagtctcagttttgaaaaacgttttagcccagaactgccttcttctccagaggtgcccagccctaccttcaacatccctgcccagtggcaatggagccagcttttcaatatttgcagagacgaaagttttctgaccactggtccagtgttctttccaaaccggatcactggcagagcacagacctgtcatgggatagaggataactgctggttttcttctgtggttccacctccccacccctgggagggatcttttaagatactggctgctggcactagtgatgtcatggcaactgttattgcagggcacgttgaaatccattagcaggcattcaaggctcctcatgagtaaagtaggggcaatgtaaaaaagttagtttggcttccccaacttccttaatcccaagaccccgtgccaggtacttgtattttctatttgctaaatgttagttgaaacaaagggctgttttgttgggtttgtgtttccctgtggaaaagattactctaggcaaattttagaaaatgcttttaaaaagaatcttgtgtaagttgaaaacagagggaaagaaagtaaatgtcttgatggctttttattacaataaaaattgtagtgagagctctttcaattccctccctcctcccatctactaaacaaacctttgtctgtgggaggaggattatgtttaaacaagagagcaaggtgggaaagtggcattatttgagaagtcctagtgctgataagtttgtgatcagtgacttcttgagtacttgtcaagattaaagaggtgctttaaaagtaagaatttgctattggtggttgtgggaagggattacctatagatccaataggaaaccattttgagtctgtaatgtgaaatttggggagtagaggagggtaaaggaaacaaaattcaagcaatgaaaatatttctttttggtaggggaaatgcttctagagttcaattgctctcctcagatacctttaaaattgccttacctttttttgactatgataaaaggacctcttaggcatatgtgccaattatcagagattttccctgataatatgataaattttcatactccagtgaaatttggtgattggcaggtcattgggttggcagttgtggttctggtgatgtcctagatatgttggaacttgggataggtctctggaggacatgatgcaggtagccttctggtagtcaggaggaccccagctgtttctccacatggctcctaaaacaggcaagaaaatggtggatctagacctgtactgtcaaatatggtaactgctagtagccatatgtgactattgagcacttgaaaatatggcaaattgagatgtgccataagtgtaaaatacacaccaaagacgtagtagaaaaaaggatgtaaaatatctcatcagtaatcttttattttgacaagaggatgtaacaattctaaatatacatgcaccaaatactagagtgcccagaatcataaataatattagacctacaaaaagatgtagaaccaatacagtaataagggggacatcagtaatctactgacaacattagacagatcatcgaggcagaaaaacaacaaaccctggacttaaattggactttagaccaaatggacctaatggacatttacagacattctgccttacaaccacagaatctacattcttttcatctgctcatggtgcagtctcaaaaattgaccatatgctaggccacaaggcaagcctcaatacattttaaaaaattgaaataatgtcaagtaccgtctcagactagagtgaaatagaactagagatcaacaccaaaggaaccctcaaaactctacaaacatatggaaattaaataatctgatcatatgtgattgttgggtcaatgatgaaattaagtggaaaaaaacccaattttctgaaacacatgaaaatagagacataacataccaaaacctctgggatacagcaacggcagtgccaagaggcaagtttttaaaggattaaatgcctgcataaaaacatagaaagatctcaaattaacaacctaaccttatacctagaaaaacaagaacaaactagaaaaacaagaacaaaccacacccagagctagcagaagaaaagaaataacaaagatcagagcagaacaaaatgaaattaagaccaaaaaagccactcaaaggatcaatgtaatgaaaagttggttctttgaaaacataaataaaattaatagaccactaactaaattagcaaagaaaaaagaagagtcacataaacacaatcagaaaagttaaaggtgtcattacaaatggtataaccaaaatacaaaagatcaccagagactattgtgaccatctgtttatgtacaaactagaaaatctaaaggaaataaattactgaaaacatacaacctcccaaggttgaaccaggaagaaatagaaatcctgaacagaccaataatgagtagtgaaattaaataagtaataaaaaaccctctaacaacatcaaaaaaattccaggaccagatgggttcatagccgaattttaccagacatacaaggaagaactaataccaatctttactaaaactgttccaaaaattgaggaggagggaatccttccttactcattctatgaagccagcatcaccctgatactaaagccaggcaagcatacaacaaaaagagaaaactacagatcaatatcccagaagaacacagatgcaaaaatcctcaacagaacactagcaaactgaatccaatagcacataaaaaagatagtatactgtgatcaggtgggttttattccagggatgcaagattggttcaacacacacaaatcaatcattgtgattcactgcatgaacagaattgaaaacaaaaatcatatgatcatatcaatagatgcagaaaaagcattagataacatccagcatctcttcatgataaaacccttactggctgggcgtggtggctcacgcctgtaatcccagcactttgggaggctgagatgggtggatcacgaggtcaggagattgagaccatcctggctaacatggtgaaaccctatctgtactaaaaatacaaaaaattagctggacgtggtggtgggtgcctgtagtcccagctactcaggaggctgaggcaggagaatggtgggaacctgggaggcggagcttgcagtgagccgagatcacgccactgcactccagcctgggcgacagagagagactccatctcaaaaaacaaacaaacaaacaaacaaacaaaaaaaacccttaccaaactaggtatagaagggacatacctcaaaataataaaaaccatgtatgacaaacccagagccaacatgatactgaatggggaaaagttgaaagcattccttctaagaactggaacaagacaaggatgcccactgtcaccactctgattcaactggaagtcctagctacagcactcagtcaagagaaagaaataaaagtcatcttaattgggaaagtggaagtcaaattatctctgttcactgatgatataatattatacctagaaaaccataaaccctcctagaaaagactcctagacttcagtaaagttccaggatgcaaaatcaatgtacaaaaaccagtagcatttctgtacactggtaatgattaagctgagaagcaaatcaaagactgaatcccatttacagtggctaccaaaaaaacactgaagaatgcatctaatcaaggaggtgaaatatctccacaaagagaagtacaaaacactgaagaaagaaatcatagatgacacaaacaaatagaaaaacatcttgtgctcctggaatggaagaatcaatataattaaaattaccatactgcccaaagcaatctatagattcaacccaattcctgtcgaactaccaatgtcactattcgcagaatttaaaaaaaaacttaaaattaatatggaaccaaaaaaagcctgaatagccaaagcaactctaagcaaaaatataacaaagctagtggtaccatattttttacttcaaattatactacaaggctatagtaaccaaaacagcatggtactggtataaaaattatacttggaaaaatagaactgaatagagaacccagaaatattacttacctataaacaactgatctttgacaaagttgaaaaaaatatactctgggggaaaggacaccttattcagtataattttttttttcagagacagggtcttactctttcacccaaagctggagtgcactggtgagagctcaatgtagcctcaaattcctgggctcaaacagttctccagcctcagactcccaagtagttgaaactacaggcatgcaccaccatcctggctgataccctatccaataaataatgctggcataattggagagccatatgcagaagaatgaaactggacttctatctcttaccatatataaaaatgagctcaagatggattaaagacctcaaactacaaaaatcctaaaacctaggagaaactgttctggacattgatctaggcaaagaatttatggctaagttctccaaaggaaatacaacaaaagcaaaagtagacaaataagacttaattaaaccaaaaagcttatgcacagcaaaagaaacaatcaacacagtaaaaggacaacctacagaatgggagaaaatatttgcagacaatgcatctgacaaaaggctaatatccaccatctacaaggaactcaacaaaacaaacaaaccaaataacccattaaaaagtgggcaaaggacacgaacagacatttttcaatagaagacatacaagcagctaacaaacatgaaaaactgttccctatcactaatcatcagagaaatgcaaattaaaaacacaatgagataccatcttccaacagtcagaatggccattattaaaaagtcaaaaaacaacagatggtagtgaggatatgcagtaatatgcagtaaagggaattcccactcatacaccgttggtgggaatgtaaataagtataacctctatggaaaacagtatggacatttctcaaagaattaaaaatagaactaccctttgatcttgcaatcccactactgggtatctacccgaaagctatacaatcaacctaagtatccatcaatggatgattggattaaaatgtagtgtgtgtgtgtgtgtgtgtgtgtgtgtgtgtgtgtgtgtgtgtacacagacacatatatacctacttacatacacacacacacacatacacacacacaccatggaatgctactcagccataaaaaggaatgaaatcatgtcttttgtggcagcatggtttgaactggaggccatccattatccttagtgaaatgactcagaaacagaaaatcaaaaaccacatggtctcacttataagtgagagctaagcaatgggtacacatcgacatacagagtgggataatagacactggagacttcatatggtaggaggatttcgggagaaggatgaaataccacctctagggtacagtgtgcactatttgggtgatgggtgaactaaaaaacccagatttcaccactgtgtgatatatccatgtaacacaactgcatttgtgtccccaaatctataaagaagttaatttcaaaaaatattttgattacatgttgattgtatttgggacatattaaatgaagtatattatcaaaatatttttttctacctgtttctttttgcctttttaatgtagctactagaaacatttaaattatctttgttggctcatatttctattgggcaatgctggtctagatcaggattcagcaaagtatagcttactgtctatttttgtaattaaagttgcccacttgtttatgtattgcacatgctgtgactgctttcatgctatagtggcagagttgactagttgcaacagagactatatagctcgcaaaacctagaatatttatcatctggacttttacaaaagaaggttgctgaactctgatctaaataattctagaagacttggcaggacctaaaatcaatctaggaaaccctgattcttactcttgtaggtcacactcttaggtaaggaagagagaaccaaggattctcctgacactttagaggtgcttctggcttttgctccctcttattcctaaactactttatctaaacaagctgtaaactttcactcccctcctgctaagagcctggaaggagggactggagagccagcatattggctctgcatagaaggcagatttggagcattttaccacccagtggaagactatgaaaactttgctactgattcatgcatttctaaaggttttccagtggagacacagagtaagggctgaaaggtagggacaaacatatggactgacttaagaggtccagtgaccccaatgagcagccatagtacatttaaattatttggggtggtaaagatattttagacccaagaggtttcatcatcaagaacctttttcaaggaggtgtgtagacctaacaccttcattatcagctgacgccataagctttggggaatggagaagactggaaaggagatgtggaacacaggatagaaggcacaagaggctggagcttatcttgactagaccacagcccacacccgagaccgccctatgggcatgggccactggagggtaatcagagactttggtgtgacgcctccttaaaaatctcttcccactttcttctcccaaaataaatacattttctaagacaagaccctgaatcagaatcagtttttctacaaactttgggtggtgttaattcctgccaacacagggcaaagcatattacagtgaatggagttacagtattcagaatgaattatagggcgctaggcacgtgatttaccacctatagtaaacagggcttcacacatggtgtatttctgctgtgttggttagttattaactgcaaaaaaggggaaattcatttagaagacgtgctcattttttatgaggtaaggctgcctggagatgcatggcattttaaagcaaacgaattcctgggagagcccgagcttaccacccagaaatgtggcaaggaataaaaacatttacaccagtttaatatgaatggttgaagaaaatatctattgcacattgaacatgatatatgaaaccataacctactcttgtgtagtaagctacagaaccattcacctaacagattactattcgagttgacattattctgcatcttttcgatcttctcttgccaagtgctggaaactgtcagagaaagccagccagatacataggcactgttggcctgggggttgagaactcataagactcttgaaggcggaggttacccagtgacccccttgctgcaaactatagtggaagtcaaaggatgacagccaacataaacagcggctgcatgtggaacgtcaaagtcaagacaaatagaggtgggactttctctgtctcctgctccctttctagtctgtaaaatggagcttatttcctatcatctagcagaataaaaagtgccatatggctttggggggcctcagaagtgcttcttggttcattcttataacataggtggaatttgacctcctcaaaaattattaaggggtgactcttgcttaatcctactgtgatttattggctacatactggatatcaaagccaaaaggaatcgtaggagacgttttggtataactctttcttctcccagagatgaagaagctggagtctcaaaaaggttaatgaattgccaaatgtcaaatgctagttaagtgcaggactggtgctaagaatgcaagtatatctcaatttctggcccggagctcttgccttctacctttctgcttgtgtgtgcacacacaaagttgcttgcaactgctgttttctttttgggtagagtaatgaaaaatgacttttgatgtttttgtaaatttgcaaatggtctaggtcagtgtccatgttaagacaccttactcggcctgacactcctaattggttttaagattctgggcctgtggagctctttcttttaaactattaactacgaagttttatatttcaactcattcacatctactgaagtgatagcagcagttttatatgtgggcagattaatgcactttgggaattttagagaattaactttactgcccagtgcatttgtggcatatttaagtaaactagagaggccgatccttgcaaaagcaaaagatattctttttaatgtgaaatatatgggttttgacatgactataatttttagactctcaagaattttattctgatgttttgtctgacatctctaagctctttaatatcaccaaagaactcttggtttgtattaattctgtttcatttgtgtattttatgtgtttagtggtcatatttgaaaaacatctcttgtgagcgctctgtataattttggcagaaaattactttttttgtgtttctgtgatgatcccctgagatcatttttgcataaatccggccttctattttcagatacaaatctgttgtacagatgattcttcttagaagaaaagatgcatttgtagctaaaaaatgtaaattacttttcatggaaaatacctctctgggcccccatttccaaaatgtgatgattgcacatcgcatgtttttgtgcgtgctcaggggactgcttttcttataattagaaaagtcttgattgtgcagcaggtagaatggggtggcacggctgcttctgcagcataggtgagtcagtggaggtaccagaggaataagcaagagaccttatgtggaggtggcacttcactaagggaaggaggtcttagttgttgaagtgggtgtgtcatgagccttctttacaggatgggaatgttaacagaggacttttagacctggagacatttaaacacaattgccatcctctgtttgtattttcttcttgcttgtgattttttatacaggattcaaagttttatttggtctcttatggaagcatgtttggaatgaacaccctcctcatcacaagttttatgaaatagtggaggacaacagaaacctcttcctaaaatgtcttctgctcagtacaagggttagtgtttgagggactttgaggcactgctgtaaagcaaagtgcaaaaatcaacatattcagatttgtgccaaagaaagacttgagtttgagaacatttacatctgttttcaataattcctcgcatatgttgcagaatgtacgttatccatcttgttatccaggaaataacatttgttgcaaacagtttgccaattcgtaattttattgaatttgtttatcatgctgtggcttcatatgaggtctgaaagatggtgatctttggtgttccagctgttgtaacattctgcagtggggccttaattccaggatgagctggaattctttggagggtctgggctttctgagaactacagcataagagccggcattgctgatgggcaattatctttggggaacgcagtaactttgcttgtacattcctcaaccccattttcatttctggcttttaaatgtagtcttgggactgatgtgttgaatagcactccttgtgtgccctatactgtctcctttgaaacctgcccaaacttttaaactgtttttatgtttggtttgagaggatactgctccccaggaaaaaaatgattatttagaacgaccccaaactatctcagacctgaaaagaagtagattctcttcaacagagaagctaagaaatatctttttgctgcataaatattatcattttcttaaggagttgttggtaggtgaaaagaaagttcaaccaggtccaattttataattttcctattttatttagcaggcattttctttactgaggtttatattgtctgccaaaactaggaggaaaagaaaatattaacaaccctgaaagctctttcattctgaattattccttaatgtttttaatgatttattataaccacacaaatgtgatcttggggccatttggaagttattgagtttccttggagatgggacttggcattttccaaaccagagtttgcttttgtggcctggaagttgcaaggcatatatatttggaagactaaagattattccccaccaagaagttttgtcaacctgaccttctctactcttatgacgctgcacacacagcagtaatctctgcagaggagagcaaataaagtgaagaaatatagcggtacgtgttatttttacatcctaaagtaaattctccagcattaaggctgactgggaatttccatctcagagttctcatgaatgctgctccactttggtgttgtcctcttgaatctctttttattataggtctttgaaggaggtatttcttgtaatttattcagccagagagataagtgagatgtggaattggggaaacaagggggtgggaaaagccttctggggtcagctgtccctgccgttgagcctgcaggctttttttaggtgctgcagccagtcaaggtgaaggactagttcagctctatttagaaaacaagtgttatctaggttctgtgttatgagatgacttttagcacaagattcaaaagttagtcttggcaaaatggacattctttgaatgttgttggagctgaatggctctagatggtgtgctgagcccttcccatgagatgatgttccagaagaatcccagagatatgaggccatcctcttcagctccacaccaaagcaggcatccactcaaggccagctcaacacttcagctccacaccaaagcaggcatccacccaaggccagcccaacagttgaacccttccactagtaaggagcaaagcagcctggatcatggctgcacagttctcgggagaacagttgtctttgttttaatgggctgtctgtggccctgcagcttctctctactggccccaattctgagaatgcagttttaaaaatcactttttggaaagaaaaaaggaaaaattctaggatgttaaaaaataatgtttttctgatttatttttacctaaatctggtgttctgagtcaactttcaaggtcaattctgttattttaaggaataaaatatatttatttattcctgttttttcccttagaatatgttagtaacacttctaaagcattcatgaaatatcttaggtttgaaggaagattcagatatgttaattaagtctatctatacttcccctggcttgtatattctttagggtaagggatactgtcttatggcaaattttgactggtaccatgttcagcacttggcctacaaaacaaatgtttgttgttgagtggatgttgaatgcatacatttttgaataggccacttttttttttttttttttttttttgctgctgagagatgtcagttgactgcttgtatcccaacttcatcgtgaaaagatgtttttctgctattcactttaaaagcatctgttcatcccaagtgtgcagtgaaagggcttccctccttccacctcctctcatcatagattttctttgattagttatcactggatcaaattattttgcagtatgatggagtgggaagcatttttgagacctaggtcagccacttacctgcttatgagcattacttgggaaaatatatcgaaccaccttaaacgtccatttccccatctaccctcccttgaggggctgttgtgagcaaaatggcctgtgtgaagctctagtaacccagcagatgctcaggaggtagagatggtcatttcgcattattctgctggacttgaccctacatctcctgctgatctttgtgtatgccaggggtttgggccctgtctccaagtgcctgcattttagtgaacttggattctgagattccatgtacattagtacactgtattagtctgttttcatgctgctgataaagacatacctgagactgggcaatgtacaaaagaaataggtttaattggacttacagttccatgttgctggggaagcctcacaattatggtggaaagcaaggaagagcaagtcatatcttatgtggatggcagcaggcaaagagagggcttgtgcagagaaacttctgtctttaaaaccatcagatcttgtgaggcccattcactatcatgagaacaatatgggaaagacctgccccatgattcagtcatcttccaccaggtccctcccacaacacatgggaattatgggagctacaagagatttgggtggggacacagagtcaaactatatcattctgcccctgggccatcccaaatctcatatcttcacatttcaaagccaaccatgccttcccaacagtcccccaaagtcttaactcattttagcattaactcaaaagtccacaatccaaagtctcatctgagacaaggcaagtcccttccacctatgagcctgtaaaatcaaaagcaagttagttacttcctagacaaaacaggagtacaggaattgggtaaatacagccattctaaatgggagaaattagccaaaagaaaggggctattggccccatgcaaatccaaaatccagcagggaagtcaaatcttttttttttttttgagacagagtttcactcttgtcgcctaggctggagtgcagtggcgtgatctcggctcactgcaagctccgcctcctgggttcacgccattcttctgcctcagcctcctgagtaactaggactacaggcacctgccatcacgccaggctaatttttttcatatttttagtagagacgaggttttactgcgctaaccaggatggtcttgatctcctgacctcatgatccacccatcttggtctcccaaagtgctgggattacaagcgtgagccaccaggcctggccagggcagtcaaatcttaaagctccaaaatgatctcttttgactccatgtctcacatctaggtcacactgacacaagacatgggttcccatggtcttgggcagctctgcccctctggctttgcagggtatagcgccgctcctggctgctttcatgggatggcatcgagtgtctgcagcttttccaggtgcatggtacaaactgttggtggatctaccattctggggtctggaggctaatggctctcttctcatagttccactaggtagtgcctcagtagggactctgtgtggaggctccaatcccacatttcctggccacattgccctagtagaggttctccatgagctccccacccctgcagcaaacttttgcctgggcatccaggcatttccataaatcttctgaaatctaggtggaggttcccaaacctcatttcttgacttgtgtgcccctgcaggctcaataccacatggaagctgccaaagcttggggcttccaccctctgaagcaatagcctgagctgtaccttgaccacttttagtcatgactgaagtggctgggatgcagggcaccaagtccctagactgcacatggcatggggaccctgggcccagcccgtgaaaccattttctcctaggcctctgggtctgtgatggaaggggctgccatgaagacctctgacatgccctggagacattgtccccattatcttggctattaacatttggttccatcttacatttctgtagctggcttgaatttctactcagaaaattggattttcttttttactgcatcatcaggctacaaattttcgaaattttaatgctctgtttcccttttaaaactgaatgcctttaacagcacccaagtcacctcttgaaggctttgctgctgagaaatttcttccaccagataccctaaataatctctctcaagttcaaatttccacaaatctctagggaaggagcaaaatgccaccagtctctttactaaaacataatgaaaatcacccttgctccagttctcaacaagttcctcatcttcatctgagaccacctcagcctggattgcattgtccatatcattatcagcattttggtcaaagtcattcaacaagtctctagggatttccaaactttcccatattttcctgtcttcttctgagccctccagactgttccaacctctgcctgttacccagttccaaagtcgcttccacattttcaggtatcttttcagtggcaccccattcttggtaccaatttactgtattaatctgtcttcacactgctgataaagacatacctgagactgggcaacgtacaaaagaaagaggtttaattagacttacagttccatgtggctggggaagcctcacaatcatggcagaaggcaaggaggagcaagtcacatcttacgtggatggtagcaggcaaagagaaggcttgtgcagagaaacttctgtttttaaaaccatcagatctcgtgagacccattcactatcacgagaacaacacgagaaagacctgcccccatgattcagttgtctcccactgggcccctcccacaacacttgggaagtatgggagctacatgagatttgggtaggacacagagtcaaaccatttcatatactctccctagtttcctggctaaataaggtgatcacatatcataggttttctgtggctatctcattttaaagtatgttgtccttttgtcctctaaattattgaaatgtcaagaaaatctcaacaacttgatgtctagttttagaatctcccagccagccccttgcaccagaaaatagcacaaacgacattgtttaatgcatcctaattttaatcagaaaacagttatcctatttctggcatatcatggatcacctgactggtacaagagaaagaagggttttgtagggatattgcaaccacgtattaaagcctgaaagacactctgaagagcatctcatattctaatgtctctgcctattagggtggtgtatcaagaagatgtatcttgttcattggtactttcaagggctgtgatctctccataagtaagattatcagtgattggagccttttcctcctttgatgatctcttctctttttgcttagtttcccattgctgctgtaacaatttgcaacaaacttagtgggcaaaaataacacagctgtattctccttctgtccctccaaaattcacatcaatcctacgtgaagtatacattcaccccatcccaaggtcaccaaaagtttcagccattacagcttcaagtctaaaacctcatctacatctcatcagctaaaaataacaaatctcatgatctcaataatttaaatcaagtatgagtgagccgctaagtataatccattcttggtgaaaattactcttcatctgtggacctgtaaaatcagaagtaagttgtctgcccccaaaatacagtgatgggacaggcacaggagactgtttatagacattccattttaaaagggatacagtgaaagggaaaaggagtcagtcaccagtcccaagcaattttatacgtggcagggcaaacttctttaggtttcaggacccgggaataattctgtgtggcttgaggacctgcgctctggatttgagcttctacactctgggcttgaggctccacccactgggtcatccttcctttttcgtgaaggtaggatgtgtttgcagctgagtagttttatcagcctgtttcttgtctgtagaacttgcctactttacagccttctttcattttatcctttttatcccttctattctaagctgacagtatttctgctagtataacattctcaaaaaacttatggtatccaatgtatgtcatggggattcattccatgagacaaaagggtcctccatagctttttctggataattctatgtctatttctggcttctgttgagatggttgaggggattcacgagtcacatgcctaatctcttcaaagagctttctgtgtgaaagaatactctgatattttgacccttctgagttatttgccaaaggttgttcatttacaccctggctttctttctagagtatcccttcatggcagtgaacctcctaattttaaccttctttgcaatctgaatagctgagcatttcccaaatcatcaagtcctggctcctttttaattaacatcccttccctccacttatcttttccttcttgcctttcactataagcagcaagaggaaaccagattggaccttcaacactttgcttggaaatttcagaaaaatatccaactttattgctttcaagttgtgctttccatgtaactgtaggacacaattcagcaaataatgctgccattaaaaactaaggatcctcttccagtgtccagtgatatgttccttatttccttccgagctctcagcagcagtggctttaacatccatactgccactaatagtctgttgatgatgatttgggtattctctaagacagtgttggtttctctgcgacagtcctcgcttccttctgagtcttcaccagcggagtcattcatgccaatgtttctactaacagcctgttcaagcccatgtaagcttcttctatcatgctcctcaaaattcttccaacttctacttattatcaaattccgaaaccacttctactgttttagatatttgttacagcagcactctatttataagtgtaaaatctgtattcgttttctattgtcattgcaacaaatttccacaaacttagtagcctacaagtaatacacatttgttctcttatagttctagaggtcagaagttcaaaatgaggcatacagggctaaaattaaggtgatgggaaggctgtttcttttgggagcctctgagagaaaaatctgtttcctgtgcattccagtgtctagcaaccacctgtattccttgtcttgtggccccttcctccttgttcaaagcacatctctcagtttactgttttcattactatatcactgttttctccgactctgactcctcctgcatccttcttataagtactattgtgatgacattgggtccacccagataatctagggtaatcctttcatctccagaattttaactcaatcacatttgcaaagtccctttttccatatgaattcacaggttctgaaaattcatggacatatttggggtggtgttatgtagcctaccatatcgctattatttcagttctcccaacttttagaaggttgatagacagcacgtagtagtggaaggaactaatctgggagtcagaaacctagatttcagtcccacttgggctactaaaaggttttatgccttagatcaagccattttgcttttttggacctcaatatcatcagttgtaaagtgaggggattaaactgagtgatggctaaggcccttcaggactctctactgttatgcttctttggttctgggctttcattgcaatgaggtgcttctttagaaataagaaatggtgagttttagttgctgaacagtttagagtgaattagccaaaatggtgctgcagttcagtgctaaagtcagttgaggtgacttagtttactgttgttgttcttgccagattatgggccttttacatacagtagatgctcatcaaactcaatggaaaagcattatcaagcacagtttctcttagaaggcacttgcactgaataagaaaaaaaatcctcactctcttagtgtaggggttcagggcgacttaaatggtaaaatctgaggtctgagtaaagggtttcttatgttctctagggtggaagttatggctgaggaaggatgggaaggttttccgaaggtccgtgtctccagtaggagaaagcaggtcctttggagaaaatgtgcattggcttttgctagattcttgcagctgcacagaaggctgctgcagccaacacatgttatagagctcaagagagttggaagtgatgtctgatgctaagtcctccacaagcaaaccagggaaatcaactgaagaagaggcctcaaagaaatcaggtcaaggaatttaagcactgagtctaggaggattcagaagaggatatttagtttttcagcttgtcctctgggactctataccactggggactcatatacaatatttctgttgttgctaaagggcagtaagtatgatgattagaatttgaaaagcagtccctctggtaggccttaggattttctaaactgctttgcaaggctaggttaaatcttgtgtttttttaaaagaggaatcttctattcagcacacaaatgagcaccctacctttgagcctttgtaattttactcatgttatttcctatgtctggaaattcttgtccacatctttacctgcttacaatcttctctgtccttcaaggatctgcttaaataccatgctttcaaacaaaacctcttatttcctctctctccgaatgatcttttctttttcttaaactcctgttgaattttcagtctttaattttttaacagcattggccacagtaggaatttaaatgcatgctttctctcaggtgcattataatgtcattgagacatttattcatctttgcatctctcatagtacataaaactggagaggagggcttaatatgtgtagaaagaatgaatagaaaaaatatctaactgtacatgtaagcatagactcactgggtacataaaatataaattaatgtccatagaaatctatattgatatactgatattgatatagatatagatattgatatagatagagatgacttagtactcaagatagtgctgagtgttgatgtaagagatgtataaggcttgaaactctaagccttagtaaaaccatattctaattgtggagagaatatagcaaaatattcatgagcgatagtattaggtggggttaaattttgtgatacagatagtcactactcctgtatttcagagaagaggatgctctctgtaagctggagtggttggggagatctttgaggaggagaaagaatttgagtgagcccttgaatgatcaaacactttttcaggttttaaggtcttcgtagaaatgtcaaacattttcatgtttgtctataggacaattgtcatatctttcattttagttgttaaaaaatagaatggacaaaaaatggtgccagttcaaaatgaatttacatgtatttgtaatgcatgttttaaattttgtcttcaaccaagcttaggacacatgtggatttgaaggctcaagaattccaagtaaccaaaagagtataattgtattgtttataacagaaagaaaagataaatgcttgaagtgatggataccccgtctaccctgatgtgattgttatgcattgtatgtctgtatcaaaatatcttgtgtaccccatagatatttactatctactatttacacattaaaataaaaaaaaaaattccaaggctccttggtgtggaccatggttctcggaatctgtggagtaggaccttagtaaatacttgtgtgatggtgatggatttctggttaagatttcttgatttttactcttttaccaatttcttaactatgtcgctaaggtttagttagctttttttgttgttgggtagacatgtcctaaaggctttttgtacccgatctcagaagcttgtttttcaactgaattgaaatgtattttcaattcagtaaatgaagtatatataaaaaccacaatgactaaaggggcattttaaagaaggttaggggcaggaaaatcaactaaatttgatgactgaaatgttctatttttcaaatgtccataacattatcaggaggggaaaagccagaaaccattgtgattaaaactggtgatatatgagcgtggctttatcgaatatataatatgattatttcatttgtaaagtgctttgcaatgcatgctgagtcaaatgcaatacaaatactaatataatatccagcattgcaaatccagagaaaaatgtattgtgtatcgtcttatgaaatataatttccagtgattctgaatagtttatatagggaacattttttttcttgcttttcatgcttctaattaaatgaccagaataaaacaatcacttgaaaataaattctgaaagattatttcttaacatattttcatatttttgccagcttcgaactcttggattctagctggcatgccagctgatttgtgtgggtcatccagactgtgagttcaggtttttttcagggatgaaaaagtcaagcctcttgctttggctgaagtgtctgagtttatgataatgtaaatattgccttgtttgtcaaaaccaagcctgcatcttggctttcttcaggagacctggaaagagctactacttcttaactcaacaagcatttatttgtttcctacattgtgatcacatatgttttaagcattcttggtaacacaaagagtatttcctggtttcttgccaacttattggtttaaagtcctgcccagtgaagagtgaagatgtgtatttaaatactgcattgtgtgacagaaattccaagagtggtagatgatcaggaaaggagagacaatccatggattctagtaggtgggagagcacaacttgatatggccagtggcaatccaaccccaaagactgtgggcaagctggtggatggagaaatacaatggatggtgctctgaaggatttgggggagtcaaagggaaggggaaaaaatcctccaggcctatccttcacttagctttttatttttaacaaatgaaaaatacatagagcagttgtcatttgttaaagtgtagcagaaagagcgaaacaggccagtggaggcttcatcaagaatgctcattcagaatgatgaatgtggctaaacacacatttgttcgtaaaacttgcagagtggctgagcatcattaagcatgagaaataggtgcagcatgctgagaagagagtggagcaaacagatgttgtgaattttcacaggcatccttcatccaccagtccatcattaatatagttgaaggtgatcctttctttttatttaataagcacaaacaaagtgcatgtgttgtgattctgctgaatgcacttctttttctgaagaagtaagggcgtgcaagaatggggaggatatgtagacacatcagttccctgtgctcccataacatgatatcagccttggggcacagctagtgcagaataccacttttatttttccttttttttttttttcactcatcttgcagtagctctaactgcctcatcactctgtttgctacctagcagattatctggatctgcaggagaatgaaaagctttatggcttttgaccttgctaccttccaattctactccttaggatgcatccgactttcttttttttttttttttttttttttttgagacagagtcttgctctgttgcccaggctggagtgcagtggcacgatctgggctcactgcaagctcttcctcccaggttcgcgccattcttctgcctcagcctcccgagtagctgggactacaggcgcccgccaccgcgcccggctaagtttttgtatttttagtagagacggggtttcaccgtattatccaggatgatcttgatctcctgacctcgtgatccacctgccttggcctcccaaagtgctgggattacaggcgtaagccaccacgcctggccgcattcaacttttataatgacatgctacaacttgtttgctgacatcagctgggtagacactttttttccctattggcagaacttcattgaccctaccctgtatcatccaattctacttctttcccttccttctcttcgtttttacttcttggccctttgctagcatagatcttggcctacatacccttacaggccttccttcacttggaagcacagtccaggcttctcatcttgatccttggacccttgactaccaccaaaggattgagaaccctctcttttttaacctcatttcccagtttgtgaaatgaagatggtaatgcttcctttccagggttggtctaagtaaaagcattttgtgaactctgaaaagcatcctacaattattatgaatgttgaattgtgatctattaaacaatgagttctcttttgtagagttttcacttagggagttgtcaacatctgcttaaatcctcatggtctgtttgcctagagcttcacatttagtgccagatatgttgggtctgtgaagctgtatctgttttcactgtgtgtgtctgtgtgtgtgtgcacacgagtgagcacgcacgtgtgttgtatgtatctgttcattttcagaccaaactggaggggaaaaaacctacaagaaggcagtgaaactctcatatagagcttgagacaagatattgctttatcttgctattaatgaactatgaagaataacttataattttacagttgcgcctttcttcattcaaaataagcattattgggatcctgaataccctaaggcagaagtgaggaactccgtaataagtcatttcaaaatgcaaactatctactggtaatcataaatttgtttaacttgttacatgtactttttgaccatggcagctgtctgcctatgctttgaattggcatgttgagtttaagtgtgtttgtgtgtgcttttgtttaaagaccaatatctctactgtcatagagacccatctgagttaaaattgccaacattgccagggctttgtgacagtgctcatacatgctgtagctctggggttcatcttcagcagaattcatagaccagagtgccaggcattcactttgaagcaaagagaagtgttattttagctaacattgagcccacattctaaaggcaacatgcttggttcccgaagccttagcaagaggacaagataacatatttacatgttggatgtgttttaatcatctccttccatgggccttctcactctcaagtgcagcacatgtgtccttaaaggccttgagtagctgtggatctcctatggtttattatcgaacttaaatatacctgcagttaggaatgctatgttttgtctgtgtgaatgattgccctcaggaagagcatatgcatgtcgactcaagccagtcctgggagcctgagtcctaccttgtggctgccacccaaaccttgagagccctgctgttccctctggttgcttgggcacttggccaaatgcacaggaaagtggagtatatatgtggagactttgaatggtgtggtttgtcttcccacttgatactagttatgccgtgaagacttacctgtgaatgaggtctggtggtaacttatgttcaagcctggtgatgacagttcagctgctttgagatccaagcaccctgtaggtgatcagtgttatgccaagaggaaaggagggttggctttggcactttttggtaacctgcacgttctaaaagaaaatttctttattggaatgcatagtcatctctgctggtgcctctggagtagtgagtgagtgcttgctccagaactgatcttggtctccatgctgtgatcatcctagttaggacattgtcacagcttagatggctgtagtacaactagccctgggtttggaggcttggagtctcgtttcccctctgtctctgtttcttcattggtagatggagatgatggggctgaactcatcgcttgtttaaagttcctcagttatttagatatccacgtttttctgggtctttctccatgccaggcattgaaatgaaaaccattgaaattttaacattatcaatgaaaactgggtttactctaagtcggggttggcaaactatggtctgctgcctcttttcatatgcctgcaaggcaaaaatggtttttacattttaaatcatggagaaaaatcagaagaatactttgtgacaagtgaaactgatatgaagttcaaatatgagtgtccataaataaattctgtgcttctcattagtaagctgtgttataagaaattatgctcaatatttattatatttttaattttgtcagtaaaatttatttggcaaaggaatttttttctcttgttagtttctccatagtacccttgattttaccacttggcctagaaagcctgaaatatttactctctggtcctttacagaaagtgtttgctgacctctggtctatgttatttcacagtctcactagatgagtggtttgcaaactgtgggtcatgatccattagtttttggtgaaatcaatttagagggttacaaacagcatcttataaataaatgaaataaaagagaattttaaaagacaggacatatcaaagtgcattgcatgtggtatggcgaatgctgttttatgaagtttttctttcagatgggagcgtgtttgtatgtgtgtacatgctgggtcaccatgtcaaatataacgtgggtcatggcccaaagaggtggaaaagggtggggcatggtgtctgacacctataatgccagcactttgggaggccaggatgggaggatggcttgagcccaggagctggagtccagtaacacagtgagacccctgtttcttaaaaaaaaaaaaaattacctggggtggtagcatgagcttgtagtcccagctactgggaaggctgaagagggaggattgcttgaggcctggaggtcaaggctgcaatgagccatgatggcaccactaccctctaccctgggtaacagagcaagaccttatctctaaaatacgtaagtaaataagtaaatgaagaggtggaaagccacagcactagagcacaagctctttgagggcagaaagcctgtctcattcatttttgtttccttgggcctggcacaatgcctgggaaaaaaataggcttttaagaatgtttgaagagatgaattaatgagttcagggaagaaataaggcatgactattgaacattatggacacagctactaaataatctctgaacatgtcttaatgtgtttagctcaatgcatacggtttcctgaaatgaggaaatgcatttcagagagtgaacaaataatttattttctgtattggaagatggcacctaggaagctgggtttgagttccatcctgaaggatagtcaggtcatgtgttaagtgtggtatagagaagggggacaagcattggcttaggggtcctgagtgccagtgcttgctctaccctgaacttctgggaacttagatgagtttcctgtgtctttcttgccaaattccttcagcccaggcaaagtgagaatgataataatgattatcagacactcagctgtgaagatcagaggagaggatgaggtggagagcactttgaaaagtataaatccgtgtgcaaaggcagtgctcattattatgtcatgttaaaacgtttgtatcagaccctttctgtgggcaagacatgtgcttggcacagtgggaactagaaactcagaccccttaaggtcctcgtggttaaactaatgaatctttaaggttgttatactggtgaaaaggtaaatagcaacacaaaatttaaaataagccaatagaagaggagatgttgtaaggtcatccatgcccttgcaaatgttcagactccccaggctgaggcaaaagctctggggaaaggtgagaaggggaggtggtgccagaggtatgagatagagagtcttgaatagaaaggaaggcccttctcgctgggctgtggtagtggcagcagaaaggagaagcccctgtagatgaaaaagtcccctctcagtgagtgactccctgggctaattgctgcattactctctttgatgggcctgatggtgctgagataacaaaatgaaaaatcaaatgagaaatggaacccaggagtctaaaaagttagtaaattttgacattagaaatataatcaaatttcaccagtgcttttctgtagtgacagccaaatccatccatgtcagagcaatggcctatggtatgtggtttcgtgtggcttttcttccccctttctcttttccttttgcaaaatcagcattaggctatttggaggacaggcgagaactattatgttaaattgtgctacctacaacttaagcttctgtctttgctaaagctgccagtttttataaacaacagaagacagaaagggtttactaagaataatgttgaagcccaaaagaatcctacagcctataaatcttaatagaggttctgagattccagcaggctggatgtgtctcttttacccgggctcactccatcttggctcccccgtgatgactccaattttctcgaaacacaggcacagtgccttgaatttacttgtggcactttttgcctacaaacaggaatacatgcatataacctatgcaaatcaataaaaacatgtcaagaccccttaggtcgcactactctcctaaaatgcaatttatcttgctgcaaatgagagtaagggactaggtaacaaatagcgtctgatcatttaactagcacctgttgtcaatgcatttgaaaacggcatttttcatttgacatacagtaaattgcattttcatatatatcgaatagaaaagtgagctgggatgtacatatgaagccctttatgaattttatgaacaatggatattttagagctgtatgtttaaaggggtcacgtcagttgctgcaaatttatttgttccttccagcattggttgtgaacataccatagttttcttatggctggatgttgaagtgtggcaacgctgaaagtataattatatcattcatgttaggtgaaggacaattactataatttttgtataaaattgaatataacttaaatgtgtaaatatgatttttttttgtttttttttacaaaagtttcttgggggaaagctgctttttatacattacatttttcagtcaattcctttgtcggcttaaattatgagccacaggttttttttttaaatgcaatattttgtttgcagacgggtggctgttgcacaaattcaacaacacttaggcttatcagcaacaatggttttcacattagtgagcatggtttggcaatattatttgacatctggaacaagctatattataccagacatatcaagtataactgaatggatcatttaactggcatttgtttcaaaaactcccactccagcttttgcctggctgtcatgatatgccggcaacacatcctgtgtttccctggcttctgtgtccctcattggcatttggcagtctcatgctcccttcccaccttcaggtggacacttagtcatcacgacgatgaggccatattcttgcgtctctttttggagaagtccaggatgccaggtagctgcagagggaaggagctctgtgaccattttagccaggactcaggccatcaattgcaccatcagctcttctcttattttgagtgtttgattatggctcccccctggcacatctacatgttttgtaactatgtcacacagggagatcggctttgttgaatttcctgtaacttggatagagaggagaaaaaacaggaaagggccctctgcgttgcatcctttaataaaagaaccacatgggggcagagagagaagaagctggaagtaagaggaaatggtaatagcagaattttaacacttagtttttctcagtctacctaagattttcctttagcaatttggagtatatagtcacaacttggcagcctagcaccaaagttgtatatcattgctgctattgttttactttgttgctctgcctaaggaattcactccttaggatgttgaagccaggcttatgaagaatctccatggggaaactggtatgaaaatgctaggtacctcctaaataagaagtaatgcatttacttcttgcagaaacgctgttgcttttgttacttatttgtgtgtgtgtttgtgtgtgtgtgtgtgtgtgtgtgtgtgtgtgtgtgtgtatgagcttttctctttaaactaagcaggatataagcagaccccacccagcttagtgagtaaattcataccaaccattcaaaataattaaagggaaagaaggacttgttaagtaaagcaaataatgaacaagtctcaaaaggcaaaagccaaataatgagaaaagtcataggcttaacctcattttcactgcatttggtaaaattgtttttatcaatataaacaatcagaaattgaggcttgaggcagaaaagggatttattatctaactaatgtcactgaaaggaactgctcaaggtggtcatagcactggaaagaaagaagcagccttaattctcctaacattgccgtttagattagttggagacaaattcatttttcattaagtcttttattcattccacaaatatttcatgagcttcaaatgttatgtgcaaagcaccatattaagtgtggagtgtaggcaaagtaaataaataaataataccgaaatgataccaaaaacaaaccccccaccaccaacaaaaaccaaagcagaacaaacccatttataatagcatcaaaaagaatacttaggaataaacttaaccaaggaggtggaaaacttgtacaaaaagtataaaacattgctaaaagaaatcaaaggtaccaataaatggaaagataccctatgtacatagattggaaaatttaatactgttaaaatgtcaatactacccaaaacaatctataaatctatgtaatcttgatcaaaatctcagtggcaattttgcagaaatagaaaaagctattctaaagttcatgtggaatctcaaggaaccctgaatagtccaaacaatcttgaaaaagaagaataaagttggaggcctcatacttcctagtttcgaaatgtattacaaaacaacagtaatcaagatggtgtgctattgacataaagacagacacatagacaattggaaccaaatacagagttcagaaattgaccattgtgtgtatggtcaaatgattttcaaaaagagtgccaagacttcaccatgggtaaaggacagtctcttcaacaaatgatgttggcaaaagtggataaccatatgcaaaagaatacagttgggtcctaacttcatattatatacaaaaatcaattcaacattttatagttttagttattactcttagggtctaaaactataaaactcttagaaggaaacataggaaagcttcaatgcagtggattaagcaatgatattggatatgacaccaaatgcacaggcaacaaaaacaaaaatagacaaatggaactacatccaacttaaaaacttcacatcaaaggaacaattaacagaacaaaatggcagcctatgtgatgggaggaaatatttgcaaatcatatatatgtagttaaatccagaatatataaagaacttctacaattctataacaaaaagatgacctcattaaaaaatgggtgaaggacatgaatagaagttctccaaagaagatatacaaatggctaacaagcacatgaaaatatcacatgattcaacatcactaatcataaggggaaaatcaaagaaggtaccaataaatggaaagacatcctctaaaagattcatcactaatcataagagaaagaaaataaaaaacatgagctatcaccttatacccatttggatggccagtatcaaaggaatagaaagtaacctgtactgctaaggatatggagaaattggaacccttgtgtactgttggaaggaatgtaaaatgatgcaactgctatgaaaaacagtatagaggttcctcagaaaattaaaagtagaattaccttatgatctagcactctcacttctgtatatatatctgaaagaattcaaagcaagatctggaagggacaatttctcacttatgttcattgcagcattattaacaatagtcagtaggtagaagcagcccaaatgtccatcaatggatgaatggataaagaaaatgtggtatgaaatgttatgcagccttaaaaaagaaggaaatccctgtcacatgctacagcatgaatgaacctctaggcttaattaaatgaaattagccagtcacaaaaggacaaatactgtatgattccacttgtaggaagtaactaaagtagtcaaaatcatagaaacaaagtaaaagttggtgatgatgtagagtatgggttttcttttgggttgtggagtggaggcccattgcttcactgggtgaatgagcagcttttctaccagagcctgctgtttgttcaacaggcctgtaaacatacctctgtgctatgctgagtcctggtactgtgatccagcattgggcacccgggactagtctcttcttttcctgcctccttcttcctgggtattcataggcatctgcctatttacttccaaattccaagggagaattgggctcataaatcttcacaataccccagatgcattacagtgttactcactggcattgttaccttaatgcctctctaattatcttgtgtgcccagaccatagacacttcttagggaggaagagcaagagcagaagaggacagccacacctgcatcactcttctgtgtaagttccatctggcacatcctcttttctctttgggagggaaaagtggctcgttttgcccttagacccattcttgcccatactctgctttgctgtctatcacaggggctgtcatctgtgggggcagttcccaagctccttgaccagccagcttcctattgggtttgaccaatgggaggccctgtcaggagactggaaggtggagcaagtggtaagccagggtatctgtccctgtcttctctgcctctggtagcttctctggcatgggctgatctctgctgtggctccaactcctcctataggacatggcctaccagggcttagttttagttggtgaccctcgtcccagtgtccccattgtctttcagtctgagagtggtaatgccttcttattcttgcttctcctgtgctgtatatccttgctgtaaattcaattcccagcattgcatttcttcttatgtagatacttgaagcagttcctattttctcggtttgaccctaactgatgcagttctgtaggcctttagaaagccctaagtagttctatggaatccacccaagtgtccatcaatgatagactggataaaaaaaaattgtacatatataccatgaaatactataaagccataaaaaggaatgagatcatgtcctttgaggggacatggatggagctggaagccattatcttcagcaaactaacacaggaacagaaagccaaacaccgcatgttctcacttctaagtgggagccgaacaatgagatcacatagatacagggagggaaacaacatacactggtacctttcgggggtgaggttgcgggagggagagcattaggaaaaatagctaaagcattctgggcttaataactaggtgatgggttgataggtgcagcaaaccaccatggtacacgtttacctatgtaacaaacttgcacatcctgtacatgtaccccaaaatttaaaataaaaatttaaaaaagccctaagtagttctgttgaaaaaaccatttactgaaggaaagcaagattggaaaccaacagtgtcaaatttttacacatggttcagtattagttatagtattagttagttgtctgctgggtctgtagccaaagctgaaagcaattgatgacaatgtgaaggtaaactggttcatgtttgctgagtgtttttttacttgtggtagcatataaattgtgaaatgggatggaaataaatgctggtatcttagactttattttagatcattatgatgataaacatggtgttttcatattatagaaacttctatcatcataactcagcatggatagtctatccagtttaataagactgtatttattatatgagcaccttgatggtctggcatcaggccagacataaactagaaagagagcccagtataagctgaaaagcggtctctcaattgggaataaaaagattaaaaactgcagattacatttagtctgtaaccattttttcattttatttgagatttttaaaaagtatagtagggctattgtgaaaattgtaaatgatggagtcttttattttaggagtctttcattcctttttggtgtatgctggaggtgccccaacaagctgtcaaatccactattagcttcaagagttgggcattcccactcaaacttagtgttaaaaacattattttctttcttctcagtttttaagctcccaagaattactgggtgggtaagaatctagtgtttttctgttgctcatataacaccatctgggtttccaagaggtacactttggcctgagagaatggctgttgagtggtatagaaaacatcaaagtcaaaacagtaacatattaaaaaatattggttcatctaatacacagggtttgggggttagaagctaagatcactcggttcggttcctgccatcttggagtttataatctactggaaaatgcagacaatcaggatggtaactgtgaagtttcggggccttgggagcagaggaaaggttgtctggacagatctggaagctgaaacttgaaagacaagaggaattcatttgacaggagttgaaacagtagtgttctgggcagaggctaccagagtatgcagaggtttgaaggcatgaacaatgagagaacatattgtctcatgagaaatgacacagaaatattttaaagttgggtctttctaaaagtaaaataacagctttaaaaaaaattgtttttttaaccccgcctggaagaggatcattttggtggttgttgttgttcaacatgattgaatatgattgggtattattacttgctgatgggacttaattttctcttgtttaaatgtgatccattatcttgtgtctagaacatattaaaatgacttcaaaatgagaaacaagggaaccttggttacttcagcacaaacatccttgtttattgagctgacatgaagggtgctgggatattttaatattacgataatatagatgcttaaatctcagggttaaagaactagattagtcctctgtgatgctgggctactcagaccataaaggtaactcagtgtttactgttatgtttttctattcttatcctgttgtgtcttgcctcctggcttctctctttttctttttttcctcttctttccttccaactcaaaactcatcaacttgcaatacccctgataaaactcatttatactgcttaccaaattttctggcttcagccagctgttcagttttttttattgtggaaggccccaaactcttctcactacttgttctgaagataaattagcgacttctaaataatgcagtgaaccctaattctctttgattagtagcaagttagatgatagtgacccattgaaattggccatcagcataaataatgagtgaatgaactgataaaatgcaaagtcactggccatcataaatcaaatgaaatccactttctctggaagtcactgaaattagaagtccatgctcctattaattattttgccttctgaagacgacagtgttataaatcagccttgaaaggcccttcacttagaaagctgaaggagtacggctgcctgcaaattgctttgtgtacgcacctaattgtttcttaagtaattcacctttgtagcattgcttcaggaaacgaagaaggtcccttcggttgagatccatgacttgtagccttaggaatggccttgagaaggctctctggaaggtccaaattggagtgggcaattccccacccccttctctagaacagatatcctcatgttctttgtcttacaactcagaccccatcaggtgggctggcatttttggagtggtttgctatggcaggatccaaaaaaaggctggcagtaggccctgagccatttcatcatcttgtctcaacttaacttccagccaggcctaagaagccaagcttcactagaattcagtgaaaaccaagattttaaaagttgagaaaaaatagagattgaaaactctgacttctgaggttcattgtaaagagttgttgtaatctgcatatattaggtatgaagtgacacataatttttggtaaaaggtgggtgggaaattatattcatttaggagcctattttgcaacagatattttaaaaaacaacactttttggaaaagaggttaattggatggtaggaaatgttgtaaattagtttcatttaggaccattacctgtcatttaaagttctgaatttgagactgctgattaaaaaaaagcaaaacaacaacaacaacaacaaaaaaaacaacaaaaaaatagtaatctcttgggtgtggtctcaaaaatttggtccagctttgagatgtgatcctggattgttagcaaatctattcagagctgacaaggaaattctctgttgcctattgagtgtgggtgacttttgctggcctctgtagagagatggatgggcaggcttgtggaggtgaagacagacatcagtaggcggtagctcctgagacttccagctgctagttaagtatatgatgagtgttcaaaactagctttagtataggctccatagatgggggttgtattagtccgttctcatgctgctcatgctaagtaatttataaaggaaagaggattaattcacagttctacatagctggagagacctcaggaaacttacaatcatgtcaaaaggggaaccaaacacattcttctttacgtggcatcaagagagagaaatgctgagcaaagggggaaaagccccttataaaaccatcagatctcatgagaacttagtcactgtcatgaaaatagcatgagggaaactgccctcatgattcgattacctcctactgggtccctcccacgacacatggggattatgggaactacagtacaagctgagatttggatggggacacagccaaaccatatcagaagtggaatgaagatagggtttttaaggaaaactcattcttacttttctcattttctaaacttcctatcatctgctgcaggcctgcccaattcccctagtggccagtacagtaaatgtacatcctggccttggaaaatgaaaatgatctcctggattgtaagaagcacattctcttacttctttgtgttgtgataatcagagtgtcctggcatgttctaaagcatccacctaaagaagaggggtgtgtgtgtgtgtgtgtgtgtgtgtgtgtgtggtcacatgcacacacagtcatctgcacagctgaaagaacaatctgctttcaagtgagtggtgcaaattctcatgtgtgagtgtgttctggtgttggggttagttgctgctaaatcatttgtgcatctgaataacccattctcaaaactaaacttaatgatgtataattgagcattatgtcatgaagtagaaaggagcaattgttccctgagatattgaataccaaatgcaaagatgttctgggctgtgtccttgaaaccagccgactctgtgatttcacagtgattccatgaggcattctacaccttcaggatgagaggacatcttaatcctctggacatccccagaactgcctatcccagctactgggcctccccaactcttattagattcctacccatagtagtagaattctgcttgttgttggagaaggttggtggaagaaaatgcagctaatggtctttctgccttgcttctggaagtccaggagggccctgccagtggtctgtgctgcaggacagagtgaggcatctgtgggcattccttgcctggcagctgatattgtgtgtctctgttggtcctcattcatctagcttgcgttttagagttgtggttatgtaatgggggcgtgtaataaagatttgttgattgttggacatgctgtgggagtgcaggaggagctcatgcgaatgagtggctctagtatttttggatttgtttctgaggtttgtacaggataggcaaagtctcgaccatctataagactgtcctcctggcatgtgtcatttattgctcaaggtttctggattttagaacatccttctttgcttgggtgatattcccctgtgtggtatataatcaagtaaccatatgtcctggtttccctgggatagtctcaatttatgcctatttttctagtatgattattaatattggccaccccccatgccttttactctcaaaatatccagatttggatggccactttctatataatactgaaaaggaatgtttatatttgttgtcctagtaccatagaaacagtggcatattgaaataatcaaggctttggaaaaatgaccaatttatttatttatttatttatttatgttttaattatactttaagttttagggtacacgtgcacaatgtgcaggttagttacatatgtatacatgtgccatgttggtgtgctgcacccattaactcgtcacttaacattaagtatatctcctaatgctatccctccccactccccccaccccacaacaggccccagtgtgtgatgttccctttcctgtgtcctgtgttctcattgttcaattcccacctatgagcgagaacatgcagtgtttgatttttcgttcttgtgatagtttgctgagaatgatggtttccagcttcatccatgtccctaaaaaggacatgaactcatcattttttatggctgcatagtattccatggagtatatgtgccacattttcttaatccagtctatcattgttggacatttgggttgcttccaagtctttgctattgtgaatagtgctgcaataaacatacgtgtgcatgtgtctttatagcagcatgatttctaatcctttgggtatatacccagtaatgggatggctgggtcaaatggtatttctagttctagatccctgaggaatcgccagactgacttccacaagggttggactagtttacagtcccaccaacagtgtaaaagtgttcctatttctccacatcctctccagcacctgttgtttcctgactttttaatgatcgacattcgaactggtgtgagatggtatctcattgtggttttgatttgcatttctctgatggccagtgatgatgagcattttttcatgtgtctgttggctgcataaatgtcttcttttgagaagtgtctgttcatatccttcgcccactttttgatggggttgtttttttcttgtaaatttgttggagttcattgtagatcctgggtattagccctttgtcagatgagtagattgcagaaattttctcccattctgtaggctgcctgttcactctgatggtagttccttttgctgcgcagaagctcttgagtttaattagatcccatctgtcaattttggcttttgtttccattgcttttggtgttttagacatgaagtccttggccatgcctctgtcctgaatggtattgcctaggttttcttctagggtttttatggttttaagtctaacatttaagtctttaatccatcttgaattaatttttgtataaggtgtaaggaagggatctagtttcagctttctacatatggctagccagttttcccagcaccatttattaaatatggaatcgtttccccattccttgtttttgtcaggcttgtcaaagatcagatggttgtagatatgcggcattatttctgagggctctgttctgttccattggcctatatctctgttttggtgccagtaccatgctgttttggttactgtagccttgtagtatagtttgaagtcaggtagtgtgatgcctccagctttgttcttttggcttaggattgacttggcaatgcaggctcttttttggttccatatgaacttttaaggagttttttccaattctgtgaagcaagtcattggtagcttgatggggatggcattgaatctataaattaccttgggcagtatggccattttcatgatattgattcttcctacccatgagcatggaatgttcttccatttgtttgtatcctcttttatttcattgagcagtggtttgtagttctccttgaagaggtccttcatgtccgttgtaagttggattcctaggtattttattttctttgaagcaattgtgaatgggagttcactcatgatttggttctctggcagagacacaacaaaaaaagagaattttagaccaatatccctgatgaacattgatgcaaaaatcctcaataaaatactggcaaactgaatccagcagcacatcaaaaagtttgtccaccatgatcaagtgggcttcatccctgggatgcaaggctggttcaacatatgcaaatcaataaacagaatccagcatataaacagaagcaatgacaaacaccatatgattatccaatagatgcagaaaaggcctttgacaaaattcaacaatgcttcatgctaaaaactctcaataaattaggtattgatgggacatatctcaaaataattagaggtgtctatgacaaacccacagccaatatcatactgaatgggcaaaaactggaagcattccccttgaaaactggcacaagacagggatgccctctctcactactcctattcaacatagtgttggaagttctggccagggcaatcaggcaggagaaggaaataaagggtattcaattaggaaaagaggaagtcaaattgtccctgtttgcagatgacatgattgtatatttagaaaaccccattgtctcagcccaaaatctccttaagctgataggcaacttcagcaaagtctcaggatacaaaatcaatgtgcaaaaatcacaagcattcttatacaccaataacagacaaaaatgagcgatttaaacttactccctggcatgtgacctctggcaagttagcttctctgagcctctgtttctttatccaataaatggggatcgatcattgcacatccctcacagatttgtgctgaggattaaataacagggaaaagtcccagcagattgttgggcacataggtaggtagaggataaacatttgttcttttcctcagaatatgccaagaaacttggcgggttgggggccagaggctttggcatgtttccgaacctcctttccagttgatgcaggcagttcagtcagcatcaggtgtcacaaaaagagagagaaaaatcatcctctcaccacctggtgtgggtgagagaaggtcctctttgagggaaaacctctccccctaaggctcttggaatgccccatgtaaagagatgcaaaaagatatccccagaagagtgagaagctgaatttgctgtttgctcaaacaaaggattgattcagcatttctagcaaaaggagcaggaggcttgccagagggccaataaataactttgcctttcacatgtaatataatggtgaaagtaatctattggtttgggagcctctatctcttcatctgcgaaatggggatagagatcatagaattaaaggaggccataaagataaagcagtgttgcaaactgtagatgcagggcaaatcatgtttttcttgtttatacagaagtaaagcaccaaatgagctgaacactatcctggggtaaaatgaccgcatgaagcaatacacataagatgcacaggtctttcagacgatcttcattcatacgcttgctgtctttcgctaatgctgcaggagggcacacacagttctgttttactggccctacagggattgctgattttaagcaagttgtgtagtttcatggagattactattcctgttcacatttttaattagaaagagaaaaaggatttatttttctcagggcttccagcccagatggctcaaagtctatggaagaagggtcccgagtgcaggtggccaggcctggttgtctgctgtgatgctggctttatgtgacctttctggctgcctaggtggggcacagattctgaggcccccccgtaccagcccaccagcagtgccctggcccctctgtctactcagtagaagcaggtaccacatggggaccctgtatcaccgcagtaagtggcagtatgcagctcatgctaggcccggtgaaaagatgctgatagcttgcaggagcccttggaaggacaagctaaaatatatccatatgtgctcatgtctgctccttctggtacctgtcgcacccttcccttccccatcttctcttcttccccctctccactaattatcacagtacagcctaacaatgcataaggctctccacccaaactaggtgggactctgtgctgcatttatttagctaatacttcacatagcacttaatgtgtgctgagtaacagcagcattcccttgaccaagtcacatgccattgagagtgggagaggctgggattagagcttagccagctgatgccacagtccttgctctacattgtttttacttcccatccccctcctttctaatggctacctttccattcatctggtttgcttgttgtttgttctataaatttctgaaaatactatgaactcttaattggagaatgcttgaagggaaggttgccctgccatgtctttttatgcattgaaaattaaattttaactacacaggtattctccatactaactgctgaggctcagttctttttggctgctcctctacccctaatctcttccccagaagagataaccacattaggaatttgctacattgacttctgcttcttctgtgaatttatatccctctctgccacaggcacgtttatttatgcatgctaaagaaagtatagtgctgtatacattcagcagcttgctgtttacacccaaaggtatgtcttagctatcttttcatgtcaatacatgtaaatatacttgcactttttgacttgtgtgcaatattccatagtgtggctatgccaaagtttatttgatccttagctttctaatgggcattttgggtgttggtcatttttggtgtcacataagtaatgaatggccttattatgggccttttgtgcatatgtacaggtgtttctcttgagtatgttctaagagatggaattgcttaatcatagggtttgcacattttaaatggtactggatgctgtcagtttggcccctgtggtgatttttatcagtactcacccctcccggtgatttatggaaagtattatttgaccagctgccctgcccacatttggtattagcatgctttcaaaatgtttgcagtctcttgggtatgacatggtacatctcactgccatttacaattttcattttcctgccaaatttgaaaaataatttcacatatgtattgtcttttttgttgtgaattgcccatgtatattattggttcatgtttctgttggcttgcatgacttttagttattggtttctaggacatctttatatattcagggcatacacacacacacacacacacacacacacacacacacacacacacacatacatctggcctcgatgcctcatacattgcaattattttcttctaatttgttgccattcagctttatggtaccctttttatatataggttttaaattttgatgctgtcaaataaacaggtcttctctgttatgctatttatgtctaatttaaggccttcctgaccttttggctgtaaacatattctcctgtatttcttctaaaactttgattattctaattttaccttttaggccttgatccattgaatttttttcccttggtgaatggttttatgttaacgttgatgttaaaattaatatatttttccccaaatggatacattcgacccaacaccatttgtttttaggtcattttgctaagtattttgaaatactgtttttgttacatataaaatttctaattatacagaaaaccagactctctattctgttccgttgatctatttgtctatctgtttgctattagaagtattaaaaatagtgtctaaactggctaagagtatttcacaaaatttatgagaggagcccaagaggtcgccttgtgcaagaggtcaccttgctctttgctggctgttggcttcaactgaacagtaatctctagagcctgaggactacgctcgattcctgtgttcttggaaagctagatcattatgatgtttctggtttttttttttttttttttttttttttgagacaagtgtcttgctcttttacccaggctggagtgcagtggcgcgatctctgctcactgcaacctctgcctcccaggttcaagtgattctcctgcctcagcctcctgagtatccgggattaaaggtttgcaccagcatgactggctaatttttgtatttttggtagagacagggtttcaccattttggccagactggtcttgaactcctggcctcaagtgatctgtccgcctcggcctcccaaagtgccggggttacaagcatgagccaccacacctggcacattatgatgtttctaactcatgctttgaagcccaatgttgcttgtgtgatacattttattactaacaaacattggaacgcttctcataggctttgaggcatgtgagtcaaagtgatggtgacagggtgtccatcagaagatacaggttctaattttaattctgccctaagttctgtggccacagattacttaccctgcctgttatacactggggaagaactcggattgagtagacctagcatcctggcttgcacctgccacttattgaacatggggtttggggcaagtatttaatttctctatctcatctgctaataaagatattattgacctctcaggatggttctaagagatttttatagaaataaggttataagatagcattttgttaactgtcaggtaccctggaaactggaactatatactaatgtgtacaagcttcattttcattttggtccaatgacgataataaatctttgtctcacctgcctcagatagctgttccaatcatcaaatgggatgtgctttgataaaattgaaatgtcatacaaattatttattgctgatgaataccaacaggtggattggaatcagcaaatattaaccaagcccatggggttattacagtgaagcagggtcatattagctgggtatcctcaggggagaattgttggagcgtgatttatccatttataggggtcctttttactcacttgggtgaaaaaaggtgtaaagttggtcctttgaaagactcaaatggtctgttaagtgtgaataatgggagaacaagtgctgtatggagttcttctgttacaagagtcaagaggcagagtgggactggctgcagtattccttgtgttatcactggctatgtctagagtttttcaaattaaaaaaggaagttttattttttatttgtttataaattgtgaaatgcttctctttttctctttccctacttacctaaatgtaagaacactaggtcattgaatattaaagtgaaagactagaacaagaaaaaaaaagatagtttcttgggatttactattataatggcaacagtctttatccctctagagggaaggtgctagttatggtggattcttactgtggtggcccccaatgaaccacacttcctagtagttcccttttatatctagttcccttttatggtgactctggacttggcaaatgggacattagcatgtgggatgcaagcacaatcttagtaaatgcttgcacattggagctggtcttcttggaatgcttgctcttagaatccacctgccaggtaaagaagctctacctagccaatgtggagagaaagagctcacagcctccagctatcccccccaagattcttgagatataagtgaagccatcttggacgttccaattcatgccactatctgacaacaaatacatgaggggcctcaaatgagaccagtagaagaactgagcccctatcaacctacagaattatgggcaggtaaaatagtggttgtttaaatccactacatttgttatatagcaatagataatcaaaaccttgggttcacacacacacacacacacacacacacacacacgcacttaagtcagtttaatgtttgagcatgaaatgatttttcatatctgagaagttggtgtttttggacttgggttcaggctactttatcaggaaatacttttatttacttcctaaatttagttcagactcaagatggagcattgcatttggggtatgtccatttcattaagaaaaaggtagtgaaagaactacctgttttcccattagggcacagtcccttcccattaggtcccctcaatccagaagaggccatgaggggaggtgactgagaaaggatgtttatttctgcagcttgcatgcatggagaacctggaagaatttataaatccatcatttcaagtcattaggcgatatgttggtcagtccaggagactctgttctcattaattcaggggagatttacttgtgtcaccctcattagtatttatgggatttatccacatcaatcggtagtgcattaacagggaaataactaaacctcctagggtttgttggcgctaataaaatgagctggaagttccagaaatcaccatgatcagaagtattctaaatcagggctgtaattgatcctttcaaagtaccctcaggatgtttttctgttcgcttcacttccagtggcatttgcatattagcatggtgtctacagccttagagggcagtccatttcttaccatgaaacgatgtgggagaacccaatggagtgttgaaaattcatcgtcagaccagggcatctatgtaaacaaagggttaattttcttataattctttttgtttggtcctggcttataaaaaaaaaagccctgcatgtaaatatatcttttatgtattctgaacataaagatagctctgtcctaccatattgatttattagattctctgacattttagttgtggtcgttatgttatatttatgagatgaatgttggattccctcattatgttatcctcatttattttacatacttttatggctggttgtgcatcgctttacagttaaagctttattgcagctgttagcgttggggggaggggaaggcaagtagttattgatcggaatttacatgtttactgttgtaatcatgatttatttaatctgtctgcacatataagcccactctctgaaatcaaaaatatatactgtatctatattttagatggtggagcattcattggcaccctcatgccctttggagtagagaatttggggatgatctggtgttctgtggatgagcacttttcttacagcttggtggtaaatggtgcagactttggagccacactacctggactcaggtcctagctgtactgcctaccggctgtgtggcctaggtcaaggtatttaccgctctgtgcttcagtttcctcacctgtaaaatggggatgatatttatacaacctcataaagttgttgtgagaagacaaccttggtaaaatgaacaacattggtaaatgcttagaatgctggacactggaaattatgaaatgctagttattacaactccaatgagtaggtggcgagctaggtagagagggaaggctcagctactttcagatgggaaacttgactttagttttaattcagcagagcaaggacacttagaatgtgcttgggtatcctctagacaagaaaagacttcattgagagctgaagaatagtcccgaaaattgatttttcccatatattattttttaatgtttttaaattttgggcctgccattagctagcttctaaggatttgaagctttgcctcagtcttctcatctatcatgtgggtttaatgttacttctctgcagcatgagatagtagtgatgtgaacagtgaactagaagtcaatagacaacttacagcctcaggcctgctactgcataaccttactaccttggcagaagacttaacttttaacggggcaaggtctctgtctactctttaaggttatcttgagaaccggatgagataatatttgcagtgttattttgaatactctaaaactctatagtaaatgttagggaacttctaataataccacctaacaaagttattgcaaagacgagatgatataatagatatgaaaagactgaaggaagccggatgtgctctatgaacctatgggatgtgctctatgaacctatgggacatgatgcaggttcagccctttaacctcctgttcccctgagtgtgagtcctaacccttcccaagacacagaggcctaggggaacctcaggctccctggattcttagttccaaggagttttaccctttcattcaacccatgtggcattaatatggtttataatatactatttgaccacatccttaggaaaaaaataaggccttcccttgtaatttccttattgtttgtttattgggtgcaagactgtgttttatctccatcatttaatggaagctacactttctgctctaatgttagtaactcaacatttgctttttacaatttacaatttggcagtgattctttgaaataatttacttttatcatcttgcttcagattttcaaagaataatccatctagcaaaacagttttatcctttctatatattcatttttgttttgaggctctttagcagaattaatgatttttaatcaaatttctaggccactcatcataattaggtttagaattatgaattatgtacagcttgccattatatcatacctccttgtggtaggtgagtgaattagagatcatcacaggatttccagagcctttcagaatgatttatgacataaaaaaatcttcaattttttcttccttgtttaaaatgtctctagaaaaatctgttttttttctgcctctttcttttaccctctacctgaaagtactgttgcttgtcagttttccctccaaatcatttggcctctgaaaaattttgcatagctaagttttaaatgaattaatcaaaattgaatctcaaaaacatgctgggtgaaataagtcatacacaagagtatttactgtatgattccatttacatgacactctagaactaatctggggtgatagaaagcagaataatagtttgttctggagagagccacaggataactttgtgggacagtggcaagttagaaatgttctagatctgaatggaggtagttctatgggtatatgcacttgtcaaaactgatcacgttgtatacttaagatctgtgcatttcattatgcaagtatatctcaataaaaaatatgaaaaaattaatcatgactcactggttctttacatatattattttagacacacttctatggtgattaaaatctatggaattcttgaggtgatatgatgtgttttccttgtatatttttagccagaatttaaagaaaaggatgttatcttaccataccagttcttctgaatcactggaggtttagaaaaaatttgtttgtcagctctgttgtccaatgatattcaagtgagtacctgccgtctgggttagcttttataggaagccattactcattctaaaaatgttcccttctcctgccatttgacttatatggaggaataatttcttggctaattttttttttgctttatacttctgaaatacaaattcactttttctaatgaatcattatcatgtactaccatcaaaggttattcactgaaagctgaagaaaaaagcaatgaaaactaattttgattgttaatggaaatgtatttttagtcctaaagagcttccctcagcaataattatagttatgcctcttgggtgtttttggacttttaaatttacgtctagtagctctttttcatttagtagttaatcttttaacagagctctgcaaatttgttctttagtctggcgttagaaaaggattgacagagattttatttcttctcttctattcaattttttcccctcctcatcgtgctggcagcccaggctactccccttattgggcaaccctggaccctgtgactagtcatatgggcagtgagggatcaggatggaaaggctagagagggagattttgcttttctgcagccagtggccacccatggctctgtgagccacctctgctccacacagcacagaattgtggcacagcaagtgggctcatcaaaggtgtttgtgggagatgggcaacactcagctttgtggcctacaactctggaatacacactcagcctgtaaggggactggctggctgctgcctttccctggcttcagacatccaagtacctgtaggcatgtggggagcttgcaaacaacaagatgtaaagctttggtagcaatgaagattgcttgttggttttgctgcttctttgctgatttcagagagaggcatgggcagctgagagggcatgagaagcgaaggggttctggcaggaagtttgctcaggttttgccctcttattaagaaacagagtacgtcaattaacctggccaacctgattagagaaagtgcaagccactgctgaggatcttgtttctggtgaaaattgacctcacccaggaacggccagacatttgggtatttgcaaagcactgctgaacattaaggaacagttaaaattaatcctgtgtactgcagctcctgagaaagccagcccacatgtcaataaatctagatctgtttgaagctaacgtcactaaatcttcgtcttgactgtttgctggtcgtgtcaagagctgcctgggaagatgaatttgaggggaggatgaaaaaggaactgtattaaactgcagctctgataagtttagttaagaggcaggagatgtgtccttgccatgacattcagtggctgatatttgtttccctttaaataatatgctgtacatctgtgagaatgatggtttggggctggtgacattgcatctccaccaaggttactgccgtctggacaggcagtctctctcctttctttctctatcctgcaccctgtcaataaatatcctcttgtctgagcaagtgagatacagatttttattttttttttgagacggagtctcactctgttgccagactggagtgcagtggtgcaatctcagctcactgcaacctccgcctcctaggttcaagcgattctcctgcctcagcctcctgagtagctgggattacaggcacccgccaccacgcctggctaatttttgtatttttagtagagacagggtttcaccatgttagccagggtggtcgcgatctcttgaccttgtgatctgcccgcctcggcctcccaaagtgctgggattacaggcatgagccaccgcacccagccatgatacagattttacagctaacaccagagcgtcttcatttctagaagcaatgaggttcaacccatgtagacacagtagggaagggtgaggggttagagagaaattaaagtgactggaggaagctgttttggttgtgaaactgtcaaaggaaccccaaagcacccagtgggaaggtactgacactttaagaatttatccctaaaaaccccatttttacaagcaagatatatgaaatctggggactcaggatttagggttctgttttctcctgtgattcccctttctaggtgctttggtccttgctgtgatttgcagacctatgatctttggaagcagtcagcaaactttctctgtaaagggccaaatagtagctatttttggctttgggtccatatagtctctgttgcaactattcaagtctgctgtagtgtaaatgcagtcacagtccattgtaaatgaatgggcatgtctgtgttatggacaccaaaatttgaatttcatataattccccaggtcacaaaatattattcctcttttgattttttttaaccatttaaaaatataaaaactatccttagcttgcaggctgtacaaattagatggtgggctagattgggcccatgagctttagtttgcttacctctggtctatgatttgctctgtcttgttattttccttttgtcattgtgaggtgttggctgtcgtcttggtaggaggatgaggacaccctaaagattaagttcatggcctattcaacaaggagacagagtggatgggaatgaagacaatgctgggctctgaggcagacagtccaggttcccacaccaatcccccattaacacttcctagctgtgtaacctcaggttggtcacttaacctctctgagctcctgtttcctttttctttttatgaaatgggggtaattatattttcactgtctgtattacatgactatactatagcccaagtagtcaagagataggagaatgcctagtaaacgttgtcattatatgaatgtaaggctttgggattatttgcactgcttcaccaatgcagactcttattaactctgattgttactagtattaaagcattatgtcttttgtatttcagctacaaaaacagaatcagaatttgaatggtgtaaagaaaagatactcttgttttttcactttcttagactctgatgttggctgggcattcctgagcctctcccgcttgtttagcgatttctcccagtgtgtccagatgcttggtgtaactgaagggatcacatgcagtttgtgctgtcccactgctcagaaagccccgccctcctctctctctccatcctggctcaccttcaaggcctggctgaagtgccgtctcacccaggatttctccaccagggtccttaacacatgcagctccgtcctgtgtgaatggcttgaccccacccctggcacacaccttatagaaaggacatcctgtcctcccaaagatgtacaggttttaagaaaaagggtaaaggcaaataatggaggtcacaggtaaggcaagcaggatgtcttctggccaagttgagtgcccctgaaatcactgaatgttgcccaatgggagaaggattcagatatgaagggatgggggtctagagaacttgttttctgtgacagtgttccatctatgtcatctgttacacttctagaacattttcacatccactagctctttgatcctataacaagtctttgaggcacagggaacattttaatccccatttgaccctgaggaacagaggcccagagaagctaatttacctgtctttgcatcatacagatggttaataatgaagttgagactggagcctagttctggttaccatgctgcaccccatggccaaccccagcctgatacaggcccatattgctgccatatgtgatattccgtcttgagggtgagggcacatttctatatggatatatcaaactagctgtctttgagtatgttagctcgtcttatctttccatcccagaatgcatttgtggagcaggtttttgagcaagagagcctgttatcacgtattttcagcttcttctattccggtcatacctgcattatgtaaatatgtatacacagagtgtttgcttatttattcggtctgtggtgggaaaaccaagtgcattactgattcctgggctgtgcttttcagcctaaacactttctgcagctcctcattgctcacttaatgaagtgtgaactcttcaggttggcttttaggttctccgtaatctggttcctgcctgtcttccccatctccccttccatctcaggggaagccatctgcctcttcttgatccaggctcgcttttctgtcctgtctcctctgtcatctagaactttgatccaccactcctctttttcatgtgtcttcaactctccctctccaaagataatttcctgtgaatctgtcatactctatgtgctttctctactcttaaacacatccttgatcctaactgtcccttacactattgtcctctcccctcttgctgcttcgtttatatgaaccagcctttctcacctggggctgtgggtgataactaagctctgatgtcctaaggaagggacaaactgtcacctgaaagccacatgtggccaccatctttttttgtagggcttgtgggctaagaatggtttatatattttttgaaggttgaaaaaaaataattcttgacatatgaaaaatagataaaattcatatttcagtgtccacaaataaagttttattggaacacagctgggcccattcattttggtattgcctgtgactgctttggcactacagaagcaaagtgtagtagttgctgcagagaccagatggctctttgtagaaaaaggcattgattgtgtataatgaattgatttctctgcatttagaaacatgtgttatgtacgacatttgggagaattaagaagtgagtcacaggaatcacattctgtgattcagatgaggaaaccccattgcaaaagactgactctctcccttattccttagacctttgttgtccggattctggaacaagcccttctctactggaatatgtcctttggagctctcccatgacttctcagtcaccgcatctggtgggcgcttctaggtcttatcattccatcctctctgcagcacctcccactgttgaccagcttctacttctgaaattctctgttctgtctgcttagaccttgtgatctctccttgctgtctcatcctttgtctactctccccattcactgtttctttgtgtctcatctttagcaaactcccccctttcttgtagagtgcttgtagcaaaattgtgatatttacccctgtctccatgccgatgatttccagttcactgtctccccagctctgtcccactttccggggcatcatcttctctttgctgctcttctcgtgttcacttctctttggtccctcacacccctttgttctctgttgtcataagatttagaatctcagttatctgtgatgtatctcctcaactccaaatagtttatcagttgcttaatctgtgaggatattttcagcatccattcccatctccctagtccgaccactccttcagctctttcttatctttctctttcccaggctagccaatgaccatttcccctagctgttccccttcttccctgctgtgcagtcaggctgccacctgactctagcagacactttaggggcccccattacatctccttggctcacctctggtttcagtgacagctcccatgcagagtttcgcatgggcttagtttcctgctgatggtgtctcacaagttactgcaagagtctgtcttctttctgccccaggaccttcccaggagccaaatgagcctgtgcataagttcagtgtagcctgcaagtgcaattgagccagtgcctccatcaggggtaacctgcaactgatgggggactaaagctgatggattgctgcccagcctcttacctttcatgcaggcagctctgggaggcctccgtatgcttcttgggcctactggaggaggagtcatgcccattgccaagagcagcaaccttgataatgcaccctgatgttggattttcctcctcccctccctttcctgctctcttgggtcatctcccaaataagcttcctgcccccgtgtcctctcaggctccactttcagtagcattcaaaccaagacacagaccagtcttctaaaagcttctgcccagacatcttcagtggcttcacaagctccccaatatcggactgattgtgttttaaaatcctaggctccctgggtttgtttgatatcagcttatcttactaattttatcttcccctactcacctttaccctttgttttcatcaaaccaggttccttaagggcagagattgtgtcttattcatctttgtttctccatttgctcaatatccaagatctgaggaaactgaaggcaaatgtatatttttagtgagcaaattaatgaatgagtgaattgaatgtattcatcttcacatgtgcatccattgaggcattcctcctcctcattgcttagtagtgatcttcacctccactaacttgacaaagcaccccatctctaccactgtacggtacttttaaatttctactttatgtttttttacgtgtcttaacttctaatatataaattccttgagagaagcgatgttgctttattttctttatatttccccacagatcttatgggtacatggttccttaataaatgttggttgaaagactgagagaacatctcattatgtttccagacattctggggccttctgattcgttctattctctctctctctctttttttttttaatttttgagacgatggaatctcgctctgtagcccaggctggagtgcagtggtatgatcttggctcactgcaacctccatctcctgggttcaagcgattctcctgcctcagcctcccgcgtagctgggactacagttgtgtgccaccatgcctggttaatttttttgtatttttagtagagatggggtttcactatgttggccagggtggtctcaaactcctgacctcgtgatccgcctgcctcaacctcccaaagtggtgggattacaggtgtgagccactgtgcctggctgatttgttctattctctgttctccaaacatgttacatgttttctcgttcccatgaattgaagctatttatttctcctttgctttttatacatgcttcttacagtatttgcctgtttacctataaaaattctattcttccttcaagtccaagcttaaatgccatctttttcataaagcttttcccaatccaccctgttaaatcatcacctcttctgcaacacacgcctgttatacatttgtattattctgctttatgtagcataattttatgtggcttgtcttctctccttcttagagacaataagtgtattcagggcaaggctggttatgtcctcattgaatccagtaccttgctcaatgccctgcaatcaataaatatctgttggaatgaattaatttgaataggttaaataatataatcatgcttttgcatgcacatcaccttaactggtgcccctgacctatttttggtgcatgtccttgagtttcattttggtaatggaagaaatatcaagcagaagaaaagataaatacccagagctggtcaacatgatctactgtgtttgaacaggaatattggaacataacttctaagaatgccatttcaattatttgtaaaatatttaaatagtataatccaatttacattctatcatttctaacagctgtaaaatttactttacaccaaagttagctcaatcactttaattcagtctggaaaaacagtacaaatgaaagcttaatttgtatttaatctcctcttttgtttctacattattgccttcgaatcattccttttagtgattgagatttaaaccagagagaggaaaaaagcttgatgaaatatttgagaagaatataagccataatgaaaagtatgaagtcaatgttttaaaattccaactggctttgttctttggggtttcaattcatggcaatgtttttgtggtaaacctgaggtatgagatatgtgggttactttgtcagaatcacagggctataactctcaggtatttaaaactaggtgattcatttggagcaggttacatttatactctgtatatgaagattggcagggaatacaaaagtgcataattattatttagtgtgttgatcatactcgtatatttccaaatggctttatgatcattttggttagtttttctctctaagctctggcagtcttccagctaatgtcatcagcggggaacagcagcaaggagaggtggcagaattgtgactacctatggctttcctgtcactgtatagtatcaggtctgatgtggggttgggtggaggaagattccaggtaagggtagaatggccaaatgatgtgctacttcttaggatgaaacagccttctcttatttctctgttttccaggtggtggcatttatagaagtgttccagaggcccacacctgtccttacctgagcccttcttcttcatccctatacttaccacatcccaccctcacccccagcaaacctctttgaactcaagaggtggtagattgaaagaggcttcaatgaagggtacatatgccttagacttaattctgatcaataaatgtaagttaattaagtaaaagtcgggggaaagaaggggcttcaagctcatttatagccaagaagagttagagaagaccatagcattttacactttagaaagatgatttcagaagaagggatatgatgtgatgggccaagagtctaaaatgaaaaatagctaaagaggaattttcaacagtgccatcacattctcagaaaagaagaaaagggccaggcatctagacacctgtgtaactacatgggataaaattttaaaatggggcagaattgttacagaaatactgagttacacttaataagcacatttctctttgttatatcagctattctttatagcagctctgtgattttggtccaacatggagtagtgaccctacttcgtgaatgaggaaactgaggcccaaggattttagggacttgcctaaagtcacagtgctaataaaaggcagaattaagtttcaagagacctaggtattatggctccatagtgtagtgatgtttctacaatactatgctgtaaactgttggcaacatttttaacagggctgtcagaagatcaaagccacccagtgagctgaggtttataaaatatatacatctcccaaatatataatagtatatactaatgacagaggataagtcacagaagatgaggtcctctgctccactcactggaatgaatggaaagaagcacaacaacttaagttacattttggcttccaccttttctatcaattcagttcagtgagcctaaggccatccaagtgccacatctgtgtgtgcacatgcagataggcagggaatataatcatgagcaattattcagtctcagggccacatcgtcctagaagctcttgcatgccaatatcaatcacttagccatccaccagcccctggataatggtaacatgcacagggtagctgccagtattccctttaccatggccagcagcttgtgtgttctagagagagatagaagagtggtggttaccctagccaggcagttaagcataatgcagtgacaggagttactacctcatctctgaactgcttcctgctaattttggtgagacttttcaaggtatagactatacagaagtgagactgttccctctgggagctgctggtttagtgaagaagacagaaaacacatcagcggtagaatcagtgactgaggagtttggagaaggatgagaggcttcttccttatggggaaagatgacaaggccatttggccatttctttccttttctgtttttctttttcttttttttttgagacgcagattcactcttgttgcccaggatggagtgcaatggcatgatcttggctcactgcaacctccgcctcccgggttcaagcgattctcctgcctcagcctccaagtagctgggattacaggcatgcgccaccatgcccagctaattttttgcatttagtagagacggggtttcactatgttggtcaggctggtctcgaactcctgacctcaggtgatccacctgcctcagccttccaaagtgctgggattacaggcgtgagccacggtgcccagccagccatttctttttaaagaaagagaaaggtctaattggatagtagtgattggaccatggtggtaagatatgaggcctgattggaaagcagtgattggactctgttgggaagacatgagacctgatttgacagcattgattggaccctggtggtaaaacatgaggcctgattggagagtagtattggaccctggtggtaggatatgaggcctgattggagagcggtgattggaccctggtggcaagacatgcggactgattggagagcagtgattggatcctggtggtaggacatgaggcctgattgtagatcagtgattggaccctggtgggaggatatgagacctgactggggaacactgattggaccctggtgggaggacatcaggcctgattggagggcagtgattggacctggtagcaggacacatggcatgaagagaagcaggtgcagctgaggctgcagtcagcctgaagagtgtcctggggagctggctaaggaattggaatccttcttggggaggcagtgaaagttgatttgcttattttaagcaggaagtgatatgcttagatttatattttagaaatgtcacttgagggagtgatttagaacaatagactggaagggagaaaaggctggagaaggggacagtagtggaagccagtgtagaaattcagaagagagagacagaaagagaaggagagaggccctcgcgggagctatcttaaggtagatgcaggcataagaaaaaaatcgaaagaaaaatatcccaataacaaacacaaaaccccgacaaacacacagagtacctggtagacttctgcataagaggttacggagtcccaggtcctagtctagaactttctattcatgggcctgatatatagcccagggatctgcattttgataatctcccaggggcttctggtgcaggacgctagagctcttgaagttctcccttggttctgaccttcagcaaaagtaactcctcccttcatgtccttttctatgagactttcccagggggcctcatgacataacaagattcaataactacgattaagtgcttccttagtgtttggcattttgtgaagcactttaacaccagcccttttcatgagtgcctccgtgcttctcagactttaaagtgcatcatcagctgtgccccacccccaggatttctcattcaggaggtctggggcggagtgtgaaaatttgcttttctaacaagttcctacagagctgctgctggcccaccagccacattttagaacccctgctgtccaccactcataggaggggcagggattgttgtctgtatatggctcaggaaaccagagacttggctaggataagtaattttcccagagtggtagagttgcagctagaacctgtctgcctgaatctccagttcatattcttcaccacagtctcagcctttcatgatgcatgaccaggattggtggaacccattctctgctgggcttacgtcccctttccttaatgagctaaactgactttgttactgctttcttgaagtcttcctggaatcctctgccatgagttggcctcgtctgtgggcagtggaggtgtctgccttccagcagtgatttaagcatcctccaaagcatcttcccgaactgaaataccagagctgacatagtctctcaattcccaccaatacagttacccttttagttaaggctctgtctccaggttgtttcttagattgcgtgtgagctcctgggtggcatggatcacactgtatttgtgtttgtagctccacacctaatgcagtgctggactcattctaaacgggcagtaaattgagtagaacatgagtgaatgaaatatgttacttgtagggtataatagttggacctattaacctagtctaacaggcaaactagcttagaggataataggatgggtacattttgaatacctggaggtagttagtataaaaatgtgccaccttccttagtaaaagcaaaactcagaaccttccacagatagtgagactctcttgaaggggaggggctgatgggactcctgtcccaattttcctgtgatcattgctaatcgcattggtaccagggataagctgttttctcactctatccttagcacaaatgaagcagactggaacctttctcggggatgacacagggatgtcaagatgaaatcggaggagttcccttatccccctcacagggcatgcaacaggggtgtggctcgcttctttgatgccctgctgctgaaaccccttggggaagcatgcagacgggcaggtcatgaagagtgtttttggactccgaccccacagcagggtctagggttgaatgtttacagctcttgaagccccagtggcgtatgttacagtgtattctttcagttttgctgtctgcaggtggcttgtgttaatcagctcaattagaccctctggcttatcccaaggacagagggctttttgcatcccgtgttcttgccctagggtactggaaaaatcagattacatgtgggattggaggattggtgcaaggttttattgagtggtagaagtagctctcggtgaggtggatgggtgcaaagttttattgagtggtagaagtagctctcagtgaggtggatggggagccagaaggggggcatggagtgggaaggtggtcttcccctggggtagggccacccaacagctggactctcctcagaccgtcactgactgcccctgactgaattctgcgtcatcccgcctcaaaggccttgtggtgtctgctggtgtctgttggtgtgctcttctgctcctcttgatgtctagctgattgtgtctgtgcctgctagggtcttgggtttttatgagcacaggattgggggcatggtgggccagagtggtcttggaaaatgcaacatttgggtgtaaaaacaggagtgcctgttctcacttagatccatgggtacaagcccaagggtgaaaccctcaccagggaccccacccttctctacccagcacttccctgccccctcctgtatcaaagacggtaccaggagtgtagtctggctggcttccagggccccaggtgttctcctgctgacttgaccagccacctctcagagctctggagactgtcatctctgtctcaggtcatctgggcccttgcttagtggttcctgcttctatgcagtgggtgcgttccttaattcccagctccaggagcaccctcctagatacttggccccttccaaactcaggccaacggagacgtttctttcacttacctaggtctgctgtcttggacattgcttctcatccagagacacatctgttccccaggtgactctgacagacatagccttactcttcaaccgatctcacaatcccctgcccaccatcacaatatcctaatgcagtagcggtgtcagtcttataacttgagtgatgcagggtggtggcggcgtgaggagtgggctggcattttctcacaaggggcagcgaggcccagagtgtaaggaccacaggggtgaagcaggagaaggatcggacctcccgaacactcaattggctgctgcagaattttgcttccattagccctgcgtacctttgcccttagaaactctctcttcccaccaccaggttcctaccacacaattagagtagacactctttaatttccaaccgccttgagccctggaatctgcatcagcagtctggcattagccatggtcatttaccgcctcagattctaaataacatggtttgtgctgatggaaaatgccggccaggtccctatagatgtcactgcttgttgttgcgctgatgtatacatgcctatttctactggaatataaggtctgggggaagggaagagactgggatgaggctgagggcaagtgacctctcatcctttgttggtagttttcacaccaggatttggggtttgggttccttggggtcttatgaaaagccattgaggttgggaattttgcagggaggtgttttatttacctttcccctgcttggtgattctcagctctgaatgtacctttctgtatccacataccttgtggatttactttttccatttcttggaatgatgcaaaatgcctgggttatgacgaacatgggactgtattttctatatttcctttactgagtatcagaaagttatttgaactcacaacttgtttgccattcatgcttataatttcctggtatgattagcttcttctacacatgtgatccttaagaggaaaataaaatttccatgatgttagcaatattctcgtagatttatgcagtaggtataatatttaagctaattttataatgttttaaaaaaatcattgctgtttgtcggcctgattcctttgtttgcgtgtcatcagtgtccaatgagtagtatgtgtttcttccagtcattgttaaaacccaatatatggaaacagtgtttataccagcagctgttacaaatctggggctatggattaatgtcagtttctgaatgtagagtgctttagttaattccacccaaggacagatgatatcatctaggaagaaggaatatattagaaactgtcagccagaaggtagtaaaaggaggtgatatgttataaggagtactaaaaggtcattcaaagaagagatattgctaataactcaattaaaattttcacgctaacattttacaaatttctgtgtaagccctaaaacattttcaaagctagctaaattcataccatagattggaaaaacaggggtcaaataggattcacacaattcctttgtgagatgaacaaattgggataatctccttttccaggaagttctggcaagctaattcattgaaactcccttgatatctaggtgagagggtgggattttgtaagtacacactttcactggggattttctgttttctgtgttacactttggggcagggcaacccactcatttggtccttgactctcaggaaaccggtatttgctaagctggtgcatcactgcagttatgctctgtattttgctgcctggaaaacaaaaggatccatgttcttcctgcaagccaagaggcaaaacaaaaagtggagataaaggccgttagtggagcctgtacttggtgtaggagtacttccagactgtatgatgggataggaccaccatgctgcacagtcgggcagccaggacaggaaacgcaggaacagcaggttcatgagaggtcatctgaccatctgcctactctcctgtttgggaggaatgatactttcttgaagatgttcttacctggagtccacctggcttctcttagtagctctttctagtgttcagtcactgttaaggttcattcagttcttctcctgtccagtgaatataagcagatttctcttcttgctaatttttcccatagtcatggagaggaagtggtcagtatgtatggatacacatacatacatatttagcaatggctgtagctgcctccggtgtgctggtgctacagatttgatggtaaggaaaagtaaaggtggctgctgccctcctggagctcaccatctagcagaggtgaaggtcattaattataaaatcactcacataaacagatgtaaagtcacaatagggataatgaggcaggagaataagatctggaggcagggaacctaacgccgattcacgctgacttcctagaactgaatcaaaaggaaagccccaactttccacactaagtaacaaaaggacgagaggctactccctttgcaaatctctcccccccactacccctacttttctgcatggcagatggaaaattgaaagtacctctgattgatggctttttgcaaccaatcagacgtttgcataggagtgtaactttgtaacttcactttagcctctgattcgttgctttccacaaccagtgagactgattgcaggccaccacttcatttgcatggggtgaacaccaagtggccaatgagaaacctctaggaggaatttggacccccaaaagattctgtaaccagggcccttgagcctctgctcatcccactcctaccctgtggagtgtactttcattttcaataaatttctgcttttgtttgcttcattctttccttaccttgctgcgcattttgtccaattctttgtccaaacttccaagaacctagacaacttgcagtcaagaccctctcctggtaacaacaggggctaaggtttcagaaaaaggatatggtgttgtggtgggaccttgtttgaccgatggaggtctggattttcctgatgaagtgttggctcacctgggagctgaagggtgcagagttaactagaggaaaagaggagagggaagagcatcacaggcagagggcacagcaagtgcaaagcctcttgactggagggagtttggtgattatgaggaggaaccgaaaagaggcctgagtggttgttgaaggaagacgggcaaaactgaacctggggaggcgagcagggtcagttaatggaaggcctcacaggtggtggccaggaatcttattttttttaaatgtgaaataattatggaggttgtattcactgcaagccaaactcaaacttcttcttctcactgtaatataatcatagttcctttcctcttcaattctggggacctatattggaactttcagctgaggatttcaaactgaatttctttgttttttgaaattccttctgcaaaggtgtttggcatagaaatgaggacagcagctatagagcacctaaaattttctacaggtatctcaagatggagtgtcttaagagtcagaaattgtgacatgcatgaaaagataaagatatatgtcttttctatgtagcatgtacacaggaggcacttaataaatgcttgctgatgaatcagaggtgacatccagctctcaggaatgcaaaacaatgttttctgttttccagctatctgaacgttgctaacagagggcctggggaggagggacgggcacgaccgcatctgctcctctgtcctgtgtgcgtgtttggccacctgatgccaactccatgatggcacatttgtcttattaagtgtaagccaattcctctcccccttccagggccctcctgatggtggctgtggaggacagggatatgctgtgaaagcccagttattatggtctgtaaagggaggtggtggctgctggggaatgatcaaatgaagacaaatgcattgttaagtttttatggaccaaggccgcactttcattaagcgtaatttacataacataactgatgctcaaggccaaacagtccttgtgccccagtgacagtccctgacaacccatggaccgaggcctcatgcacaatcccccaggtcaggaaacctcctccttctccttgctagctcagcacgctggttgctccagtgctctcattttgacctctcaagccaaatgctgatgacatcaaagctacccattctactaccgattagcagtaaaaccatcgggcactctctgggcagagttcaggtgctatgttccttcctcttttcccacaggagttggcttcctggtctgaaccctccataagccctggctgggaattttcctcactgtgaccttgtgagcagtccctggttaccctcaaggattgtgccaagcaggctctgggttaacatcttggagagtacagagtaggctgataatcagcctatgctcaacagcacacccaagagttgaagatttctgatggcatccctggggtgctcagcagtggcctttgtctgcacccatcttcattacatgttaataccaccagagacactttgaggtcagccttttcaccttgcacggcaaagcaattatcatttcctttcattgcaggggtgggcgttggttatcacatgatggatttttgctggtaatcagaactttctgcccattggtcttcaagacatacttttgtgttgacatttacaaggtatgtgtcaggcagagccgaggtactgagtgagggaatgaaaggaggaggggggagaggatcattatattcaatttaatgacgacaatttccctacatttacaacttccagaagtaagagacaatagatgtgtgtcttctgcttgcatgtacaatgaaggagatgacatgaggagattctgttagtgggaatggtgatatattaccttaatgatttcattgcttgccaaataaaagaaaaattctcactgtagtgcaaagccctgtcctcatcaagctattcattgtgaggcgtttgttgttaaatcggaggcataaggaggggttttgaccttccataagctgcttttgaatttttatttttttcttggctaaattgatggtctgttttctttttttagtagacatacgtgaacatttgtatattgaatattgaagtttgttaatagatttgaagagctcttagatttttttggcaggtgggtgttgaattaatggaatgtttcacaatagagttcaatgaaagctcccctccactattatgctagtgtttggaagggcaggcgactttgtgtgtgtgtgtgtgtgtgtgtgtgtgtgtgtgtgtgtgtgtgtgtaggggaggggatgttttcatgtgagctgtggataaactgaacaaatttaattaaggtctaaactgaagtaggatcccatagtctaggtaggatccaagggactattttctcagggctgctggaggttggataatctgaattatagacaaggaggagtccaaagtcttagttcaaggatggcaccaagtgacaagtcctgtgatctagcagaagcagatggagaactaagaagaagatcagaaactaagatgacttggagccaactagaatgagatcatggatagacagccttgtaggctagacctagggacaggagaattagagtcttctggatttccttattacatgaacctgacagtggctgtttaaagaagcaatgcagggcctgacagtaactccttgcttggcttctgcttactctgtgtagtctgctttttctagtaggttatccagatttccaaagtggtggagtcaggtttgcatggtagagcttgggaactgaaggggaccattgtggtcatggaagtcatgagcatcattttccagtttagaagactgaggcctagggaggacagcagttgggcaggcccaacgaaaaatccagtttaggaggtccggggaggatagcagttcaggaggcctggggagaactccagtccaggaggcccggggaggacagcagttcaggaggcccagggagcactgcagttcaggaggcctggggagaactccagttcaggaggccgggggaggacagcagttcaggaggccagagaatgacagcagttcaggaggctgggggatgacagtagttcgggaggcctgggaaggacagcagttcaggaggccaggggaggacagcaggcatacccaaggcctctcaggcattgctgtgcttcctcaccctgcaatgctgccgccacatcctgttgctctctgtttgtttgattggagtggctctcctgaagctgggctgtttgcatgcttggtaggcccccttcctgaatgtgccagccagctctggagccctactcagtaactgtttcggatgtgatcctcatcagatatatttctacctactagttgtgtgactttgggcaagcctcttcacttctccaggtctcagcttttcgtaagtaaaatgttgcaaggtctctgtggaccctttcagcttaagcatgacatgttctgtaactaaggaggcccagttatagaagctcctggtgtagctgacaatgtgaatacagtcaatctcaggaatctgtggaaatggaagtgatggcttatactttggctcttcacccacctgaaagatcacgtagaggagttctctaggctgcaagctccttgaggccaggggccatgtgtcattcatttttacacatccaaagccatcaggctgtgtggtgaattgtgatgtttagtaaattgggactgactgaatatgaagtattacagaatttcagatgataagacatacttaacatagacattgcataagcataacacatgtgcctaggacatgcctcctcaaaagtgctcgctgagctccattgcagcagggaccacacctgtcttatttaccactaggtctcaagttccttgagcatgactaggcacatagaagttgtttggtatgtttgctgaatagatgaatgaataaagatatgacatgaaagaagcgtagttgaactttccaaggttatttggattatttggtgagagaatataaacctggaaaagagaagaaagtaggaaacttggtggcaatacacctagttttgctttccttccacccctaagctgtggctgaaatctcttgtacataacagaaagtgacaaccagcagccccatcttctagttgacattggtctgcagatggtttctagtgtatgactaggtaagtatagaaacagagcatatacattaggaaacttttacagaaattggacactgcatgacacccaagcatgtgattgctggatttgtttggctgaacagtgtatggaccagtttgtatattgctaaagtcataaatgaattgcacatggtgtatactgcacaccagtcctgtatggtaggaccacaaataggtctatgacatatcagggaagaaattatcctgcaccacataactagaaagaaactaggtgaaatccttggttttgtagcctagcagtcatatttttattaaaatattgatgatcttgtttgtcatgtaaagctgtttctgactcatcataatcacatattttctatgttgttgatttgagaaggactgaactagctacaccccctcagtcaaccaagttgagttataatctgtgtgacagtgtttttctctatttaaaactagctagtcttgcatggctatttaactcactcctttggcctcattagtattatcctataatcaaataagctaattaagctgtttcctatccactgatcagagaatattaaagctcggaaggtgactctagctatcctctgctccagctccttcatttttcagagccagttaaggctcagagaggttaagtaaagtgtctcaggtcacacggttatttataaaagaattgggactaaatcgtcagggccctttactcctaggttcttgtgcttttctactttatcctgaagtttaataaaattctttcagattttataacatccaaggtgtgtctctgttgtggtaagttctgggccgctatttgatagatgacctagaatggacagattttgcttgccaaataattatagatggttctacctttaagaaaacttggtatctgaaattatgaacacagggaacgaagaggtgattttatatataagtatatatacatttatacataaatgtaatatttatatataaatatatgatttatgtaaataataacaaaataatatatatgaatgaatttatagaaaaatactggctttggagagatgtggtgactgctattccttatagtctcaaaatgaggataaagctttacataaaattatgtattaatggaaaaataatggaaaaataggatacaaatatattggtacacgcacatttttagaaatgtatctataggagaaaatgagactcttctatgaattaaactagggagtgttgacggaggcctgggtgggtgaatttgtttcccccgaacatcatctctgtcttagcaggcttcagtgtggtctaactgaggtgttggcaaactttgacttgtaagccaaatcctgttgctaccttttttttttgtaaataaagttttattggaacacagctgcacccatttatatactgtcatctgtgactgtctttgagctgcaacttcagatttgtgtcattgtgacatatgctttatggcctgcaaagtctaaatgtttactatctggccctttacagaaaaagcttggtgacctctggtctagatgcatatctggttcatatcactgattctactaccataaggcagggggtcttcatttggaatctcacctagctgagttctgatagggaaggaagaaaatgaactttaatcaccttgctcagaagcctgttttaaaatccagtcaccagctgccggtttttagtttacctatgacctcctggagatcctgagagaatgaaattaaccacctctggaacaaacatccgatctttttattttttccactttcttaagagagtaataaatatagtcaatgactctggattctattactatgtaagagctctttaaaaacatctaaccatctgcttaatggccagtaatacgtttctaatggtcactctcgataagacacttttagttcactcctgtaatcgttgtccaacagccaagaggctcctgaagaatatgaccaaaggccagccccagccccagccctgtagccacagaggcctggcaacagtactgaagaaaaaaagagagagttctgagagctgcatgtggaaactcttttctttctcttgacactctccgcgtatgatgagttcgtgatccacaatagtggatctgaaaacttcgattttttttggcatttacacgttcaggtacagttgcaactagaggtcagtttaattaatatctgtcctttcctctcagatgacatacactgaaccgttgtcactagaaactccacatccctgatctgggcccagcagctggtgacagcttggcaaattatgaatttcctagcttaaaacagcctaaattgcagacaaaacaagccatcagctgagtaaatactgtatctctgtttagcttctgtaagaagaaggagattagcacgaatgtttagtgttcataattactagtaggaagcaaatattaggctcgggctgactggagattatttcattatatccaattaacacccacttgattattcttaattacttctgcatgatgacagaggagtaaagatgtcgtacttcaaatgtacaaataacatctgggccatcaacgtacatgtatttgtaatataatatcctgctcattttgggatggctaatatggtcttagcagagggatggaaaatgaaatgacaagattctggtaattactaagcgggtcttagacaagatgccaaaagtaggtattaggataaaaatgggccttttgtagcaatctagtttagacatgttttctttaaaaatgccttattacctttctgtgtaagaatttctttcttcctctgcccattgactatagtacaaagatataaatggaaatagctaagtgcaaactttccagaaaagagtgagctatatgtgtgtgtgtgtatacatgtatgtcaagtggtatgaatgggaatccctgctccaagggtgtttgtggagttttgagaaactgagacaaaatcagcctgtgtgcgagattcttaatgacctgcctagtaaagaatatgaaatgttagcaagtgatgtaatctcccaagcatgtgcgaaggataaatacagtgagccagattttcaggttcaaacctgaaattagaaccacctttaggaacactagaaatcatctttcctttcacaaggaaaaatatgaacaggtcctttcccttcagctattgtcttgagttagaaggaattgctggtagagcatagccttgctttttggagtagagattattagagtcttaggtttcccctccttgctttcttctggtgttaggggtattgcactgtcagtaacattgcaatggattattattttttttccaggatcaaactttggtattaaatcatgcttaaagatggaggtaactgtgagcagcaagaatggtgagattgggtgattgtgcaattgtgccagcacacgcctagaactggcaacttactaaagatcagagctgaacttggagaggtggcatgtgggtaccaaacaaatccggttgcagctcttgaagtcactcagcagttagttattgagaacttgcttgtgcagagcatcaaaccaggcacatgatgggggtggaatggcccaagccctccccagctggagagacaagaccattctatgatatggttatgtttaattaattgctaaattgcatggttcaaactaagggctatagaggtttggccaagagggctgggctgatcaaagaagaataagactctaagactgggacctgaagggtaggtggattttagctggttagaagatgttctggctattggtgctgtaaaggatggtggaagaaaagcctgttccatgtaagcagaaacatggcccccttatcctctgatgcaacccagctcaggcccaaggactggcgacctcagtagtcctcactgtaagcaaacgcaaagctcacatcttgagatggaagggacattgcaaaaggagagggccccaaggagatggtgttaatgaggattccctggtatctatttccattatgagggaagagacattggaaaatctgtcaaagtcaaaaattcataagtatatttaaagatttaagcctgaaatggaatatcttaggcagtcatttgaattctctctctatatatgtggtggctgatatttaaaaggcacacaaaacattaaaaaattactttgggaatagcatacccttccctgaataataaagaggtaatatcagggaatagagtagtgtcaggatgtaatcagttctcacctgacaaatgatggccagggccagggttattcatctttgctggtgatatatgaagccgatccagggttctcagagttggacagaaggggttgtttggcaggtggtgtgagggtcctgaagttggctggatcttggtagttgtgttcattttgtaggtgtgtatatgtgtgggggtcatgatgatagtgaagaggacctgtaccatgctttacaaaatgcaacaagattgacttggtacacagaggtagaagcttggatgccagctggccatggtatagagctactgtagtgttgtgtcatgtcatgttgcacatggcatgcttggcccacctgagaaaactgccaggaagctgttgaaagtttcttggcctatggctgggtgtggtggttcatgcctataattccagcactttgggaggctgaggtgggcagattacttgacatcaggagttcaagaccagcctagccaacatggtgaaacccatctctactaaaaatatgaaaattagttggccatggtggcatatgcctgtaatcccagctactcgggaggctgaggcaggagaattgccttgaactggggaggcagaggttgcagtgagccaagatcgcaccaccgcactccagcctgggcgacagagctagactcagtctcacaaaaaaaaaaaagaaagaaagaaagaaagtttcctggccatattgtgttgtgtagcgtagtggctggcccacctgagaaaactgccaggaagctgttgagaggtccctgcccttccctgtaggaagaaacaagaatggatttggcttaattactgcagacatgtgtcttatagccccttgctaccacaagtgtagtccatagacctgcagcattggcattttctaggggtttggtagaaattctgattgttgggtcccatcccagttgctgaatcagaatcagcattttcagaggagacctgagggaggggagcagaggagccatcttgatgtctgtggaggtaacagcacacacaaagccttgaggcagaagcttgctggtgactttgcaattgggtgagaaggtcattgtggtgagatggggaagcaaggtactacttcaaaggctgggtcatgggtgacctcaaaggctctggtcaggactttgggttttattgtatattagaggggaagccattgaaaggctttgacataatttgacttgattttagactcctactgatcactctggttggtggatcagagtgtgattgccatgggggtagtgggacatggtcacattctggatgttttagaagaaagagttgaaaggattggctgactggaaataccatgtaagagacagagatgaacaacaggaagagtggaggtgccatttactggcaaggaggggcagatttggggctgagaattaggttctggacatattaaactggagatgcttatcagccatccaaatggagatgtcaagaaggtaactgaattgagaggacccctgtggggaggggtcaggactggagctagaaacttgggagtttctgtcagtatgtaggtgatatttaaagtcatgaggctgaatgagatcacttcattccccaccagatacatgtagggaattagcgtgacagtgatgatcaatgggttttggtgatcatggtggtattgctggaacttaatcagctctaatgtcctctgattccatatagtgcgcttgctcgttatattccttgtctattctcattttgaatgtaattttaatattcatcaattgcagcaaaaggaagaaaatatgttattaactggacccttcagcttctgcctgtctatgccaactccagtgcacactagggaaacctggactccacactgactgggatgtccctgtcaccttgaattggctcagcccagggagctctgggtggcagggccctgaaatcctgccctattgcagcacaaagcaggatggatgagatattccaactcactacttacaggtgttctttaagggagcgcttaggaagttttactcagtttaacttaagacataagtaataccattcccaattcagggcaatggcttagaacctgactcaatgtcctttttactaagtaattatccagatttccttgctaaatgttattttatatattatgtttaatagcctctttcttttggctatggaaggatggtaatagcagccgataatgtatcacatactcatctcaaagttctgcctctggcacctgtggctggagtagagggaagcttgtggtcaggcctcagacaaattccatgtccctactcactggtcctgggttggttcacttctcaggggcctaaggaatcacagataactttttaacctttaaaacattcctcatttttaaagatttgggtaaacctatagagctcatctggccaaactgctcctttgcctcaattcagagcccccatgggacaactgtgggtaatagaaagccctagtagagaggaactgagcagcatagacttttgggcaatggttagatgtcataaatgcatgataaaaattaagccaccactgcatctcaagatagccaattccttttagtaccctgaggctggctttcagtaaaggttcactgggttggactcgtgtgataggaattaggttactgtgttgtttgtacagcgtgtgtttggtagcatgcacatgggcttcttagtgacgacctggtgatgcaaacagtcttccagtagctactggacacctactgtttgccagttgaccccctaaagagttactgagggctcagtgggtgctaggcatatagatgacaccaaaatatttgtcattgatctccatctgccctgaaattatgttctccagatagtcaaggctaaaacccacatcaaaaatatgtatgaaaacctaagagagcagggaatgacattggccattgtatttataaacaggttagacgtatttcctgccctcagagactttccagtctagaagggaagcagagtatatttgcatgaaatgccaaataacagaataatgcttagtattagtttgaaagcggaagtggcagagcttccaggaatcctgaggatgtgtgaaccttttggctacatctcagaatcacctggtgaactgttgaaaactgagatgcctgtgcccagccccagactcattgggcatctgtgtgttgaaaagttccctgggctgggcatagtggctcacacctgtaatcccagcactttgggaggccgaggcgggtggaccttgaggtcaggtgttcaagaccagcctggccacgatggggaaaccccatctctactaaaaatacaaaaattagctgggcgtggtggcatgtgcctgtaatcccagctactcaggaggctgaggcagagagttgcttgaacctaggaggtggaggtggcagtcagccgagatcacaccactgcactccagcctgggtgacagactgactccgtctcacaaaaaaaaaaaaacaaaaaaaaaagaaagaaaagttctctgggtgattctttgtttttttctttttagaacctgataatacttgattttttaattttgttttttatttttccataagttattgggggtacaggtggtatttggttatatgagtcagttctttagtggtgatttgtgagattttggtgcacccatcacctgagcagtatacactgcatcctattgtagtcttttatccctcgtccccctcccactcttccccccaagtccccaaattccattgtatcattcttatgcctttgtgtcatcatagcttagctcccacatatcagtgagaacatacgatgtctggttttcagttcctgagttgcttcactcagaataatagtctccaatctcatccaggtctctgcaaatgccgttaattccttcctttttatggctgattagtattccactgtatacatataccacagtttctttattcacttgttgattgttgggcatttaggttggttccatgattttgcaattgtgaattgtgctgctataaacatgtgtgtgcaagtatcattttcatataatgacttcttttcctctgggtagacacccaatagtgggagaaccaaaagtagatctacccccagtgattctgatacataatgaagctcaagaaccactgctttggaaggatagttggtgtgtgggtgcatgtatggagatgggcattgtagcctggcatgagaaagatgtgagaatgccataagatggggagcactgcaagactgcttggtaccatgcccctttgctgactacacaccagagacaaccagaagatctaagcgtttcagaggcaagaggcaatgaagaggagaaaaccacaattaaaagaaaaaacaacttttagatcatcagtaaacaactgagtgtgctaagtactagtctaagtgttttgtacttacataatcatcatcataaacccacaagttaggtaatactgttttccttactttcagatgagaaactggttaagtaaattaccccaaatcatgtggtttcctggcctggagggtaggatttgtttggatgaaaagtggaaatccagtgggaaagggacagctttcagaagaacttgaagtcctggagaagagattgaattttatcctgaaagccacagggaaatcctgtggttaccaccatcctttatgtgaccttactctcaatagtgagtgtttggactttattcattggatgatgggcagcttttgagccaacaaacaacatggggaaagtggtgttttaaggtgaatctgtcaggtgctgtgtagattcaagtggagggtacctagaaacagattagctaaaactaaaaccatttcctaaaacaccacaaacaacaaaagtgaatattgattgagccctcactatatgccatgtgctgtcctttacatctatcatcttcacaaaaaccctgtgaagtacatactcatcatgtacccattttacaggttaggaaaccaaggtacagagaagtaacttgctgaaggtcacacagctggctagtgtccaagtcaggattcaaattgtgttgcttgattccagaatctaggttactgtctactctgttataggctcttatatctcctaggactttggcagtgataagtggaagtggaaatagagatacatgacataaagagtaaatgtcaggtattacatgatgctggaatagtgtgagcatgcttaggaaatccccagcagggaagagttccttgcacaaagaaattgagtagggtttagaacagcacgtgaaggaaggcagaaggcctttctgaaataagcgggtttatgtttagaacatgggagaagagatagcataggaaattgccattctgatggccctgcatgtactctgataaaaaccatggaagttgtatgagaaatgagtatggtgaagtgagtagatttgttggttttggaatcagacagatgtggttgtgggttccagtccttttcttactaacctgtgacctagggcagtttgcataatctctgcatttcagttttcccatgtgtatattgaggataatagaagcatcatccttattaagatatcataaagattgagttcatgtatggaaaggagatgaaaaatatgacatattccatcaataccagctattactgttatgcttctcgttattacagtcattcatgggtgttaaaacagaataatgagatctctattttggagagagtactttggtgttagtgggtgcaacacaaactcaagagcttctaggtttccagttctggctccacctgctagctatatgatttggggtaattcacttaaccaatttctcatctgaaagcaaggaaaacagtattacctaacttgtgggttgatgatgatgattatgtaaatatgaaacacttagaatagcacttagcacactcagttgtttattgatgatccaaaagttgttgttttttcttttaattgtgattttctcctcttcattgcctcttgcctctgaaacatttagacctcttgttgtccctggtgtgtcacaggggcctgtggcctgtggcctgtggtgttgcccttgctgaatcctatttaactgttgagaatgtgtctgggtaagtagtcattgctgcctcaaaacatagattcatgagcaaagtgactatgaagatttgatgtgatatgtgggtgatgatcacacataaagggcacagcacataggttacaggaatttcgctgggctgtgaatttctgacatcagcctcctcgtttaatatttatccgccccacttctctcttacttgggacctgtactgaggcatggaccttgttccacaagggactgagagataacagtgctaactctgagagtgtgcatttgtgtgtgtgtgtgtgtgtgtgtgtgtgtgtaagagaatattagtagcctaaagggagatctcatgctgctttgctttgtttcatttttttggttgtaaagttgaataaaaggcacttagtccaaaacttcaaaaaaattgctactgggcaaagtaattttgtgtcaggcttctgttcagggcagatttacactggttataaatctctgaaattaaggtcttaccgtagaaaagctgaaatgtattcaacattagcagacacccagccctgttctgaaccagtggccattcttccgccatgtataatagcaatatctatctatgtgtttgggggcaataataagtttaaatatgcctcttagaatgggtaatggctctccaatgagtagcagaattttctatcaacaattcttttcctagaaccaaaggttaagttcaagagtttgatttaatgacaaagttaattaggcccttaacattacaggtttcttgcctttcattttctaatcaagatcatagtctaaggtcagcaaccttgcagaagtggggaacacaaggccagcacttgttcttctgatgtttggggagggtgactgtaggagatgaggagtgcttagcaatcactgagttgacaaagggcctggagaatgcctgctagacctgaagaatttcattcttacctctaccgaaccttagatataaaatatgcttgagctttaaggaaacttaaggattatctaatcagtcctttcattttacagccagggaaactgaggctaaagggactaagaaatttctcagtggttacatagttcacttgaggcagagtaatggatctcctaagattaaaccacctacttctaatcaaaatgatctatcctcaaatactcatattcaaggaaaagcaaaacctcttcttggcttataggatttatgttgtttatgagctagttttgctaaagcacttcttcctgcctttttttttttttttttttttttgagacggagtctcacgttgttgcccaggctgtagtgcagtggcacaatctcggctcactgcaacctccacctcccaggttcaagcagttctctgccccagtctcctgagtagctgggattacaggcacccaccaccacgcctggctaatttttttttgtatttttagtagagacggggtttcaccatgtgggccaggctggtcttgaactcctgacctcatgatccatctgccttggcctcccaaagtgctgggattacaggcgtgagccactgcgcctggccttcctactactttttaaagcaaatatattccatttgatcttggaccatgataaaccagtaaagactattggtttgaaacaaagaaattgcctgttgctacttagtccaagaatttaaaaaataataaaaaaagaaggaatccattagaagaaccttagggattctcataactggtcagagattgaaggacctggtaagggaaagggaaagatatcaaagcaggtccagaagttctagaaagaggacacaagacagatttctggaggcagaaacttccgtcccagcatttgacactgctgtatcataaatgaatcctcaccagctctctgtcttcatctcacttgttcctgatgcaaagtccaggtgaggaaatttaaagaattgagccaagggatttgccagtgctttgcctgccgggaaagcagggagaggagaggtatggatgctctagcttctactggaccctgggaacgggcactgcccactgaaaaaaaaaacacacattttggggaatttctcaaaacaagaaaaaaaaagagtccaggttttagattgtcccaaactcaagaaatgtctaagataaaagactttatgggtcattctgaagcttgaccttgctgtatgggaaaatatagtccaaggtacagactaattcatagataactttgggattcaatttacttctgggctcggctattcatgttttaatcttaaataggagtctgctggttcagggccttaaactttaagtgaaagttttgtggtgggatttttggactataatataggtgaccagatttggaaatacccttgaaaatgacgacatttcagaaatagtaaaaccatccatgtgtgtatctttccacacaggtacatgctctatacctggccctatgctgtgcattggttaccaagaagcagacaaaatgttgtgcccttctgcagcctgggcattagtcaggttcatatatagggtgctttgacttctcgcttatagtaaaatattcaaatgcagagaagactattgaagaaggcaagatttttggttacacgccagtacttcaaaagctccaaccctctcaaaaattattagtgtttgcttttccagaagagctgtttctaccaaacttggttcagaatcttcagcaaacatttcttaccagatgcgatgctagaataagtctagccatgaagaaccttataatccagtagaggagacagacatggaaatgaatcatttctatgaaatgcgttaagttctgagacagagatgtgcccagtgtgctacgtaaagacaaagactcacattcttcagatgcgctagcataggaaagttttcctgtagtttgtcttaatcctagaggtacaatgtaaatgcatcttctctgttcacctgtgtggtcagtcatggacagttactgggtggctgttacatgcaaggccagaatgcggggcctgtgatctagcagctaagggcatccattcagctaaagatgtcttcctttctccctttcctttccaaaaatggccaactacaacctcttagatttggggctggagtaggtgggggactgatgaagcatccattcatggctttggtacaggattcgcctaaatctggacatatccccaaagtactagttctgcagggatgaggacagagcccaggagaactgtctttggtttcaccttcctctccaatgtgttcaactcccttgcaggaatgttcttgggggagcactctgcaaatccacatcaggcccagaagagaaatgtttctttgaagacctgtctctattaatttgcatagatatttgtgtatgattttatttacattggtgaggcagaacagtagttctccagctttgatgtgtgtgagccttggagattagagctggggctcttcctttgagaaaacaaatacttttgtgttgatttctatgagatataaatcatacccaggaagtttacagttgagtaagaatggtataattactgattgtataccagaagcggacatatttatgaaaagacttgaaaaagcttgtaatcccttcccgtattttgaataactaattgctatgtcatcctggcatatttgcaccacaagagttaagtctgtcaaatgtttccctctgaaaaccttgttttaagggatttctaacttggtcgtaaaactgtgctccaagttggagctgacttgatgggagtctgtgcttggaaggcttgatttgaatggtgccagtcagagttaaattacaggctgggaaaaaggaaacaaaatttttaaaaaggaggtgtttatggttcccggttcccctaagtacttcttgaggatcaaaatagcctctttaaaataaattgcagaccattagtacatgatggaggaaacccctttgagactagattgggggaggggaaggcaagggcacaagaaaaaagagattgatttgggccactttcagcctgtgcagtgcattgccccccagcccccgcagcatgcccctggaggggttaatgcacacagatggcctttcatgtacccacagttgccatttctgtcagtctaagtggacctcactgcagatccactccaattctgaatcttgattggaatttgggtttcttggaatgtgttcttcctccatgcccacccccccacctttctttttctttttaaacaaatagaacactattgcctgccatcttatgcccttatggatcataaagtcttactgcataggaccttgagtatatcctgtctacgctgaactagagatagctgctggataatcatatttgcagagatttcttcatacttgatgccagacattcaagccaaaaaggtagtccttggctgggagtatttatttgatcccctacgtagagccagcttaggtatctctcccatccatcaacaacagacaattcaagataatgagaaagagagagagggagacagagagggaaagggagatgcaagaggaggaggagaggaggaagaagaggaagagagattgtttctatctctgtgtgagtcaccttgaactccagtggtctgggagtagcctctgtgctctagcacttaccatcaatggaagtgggacagatttatggcctggcatgttcaacctgaattcaaatctccttgtctttttaagatttcactcatgccttaatgacacctttttttttttttaagaaagctaattgcattggtttctccaagaggcatcactttgaacaatccatcctgactgtgaaaacaaatatatgcttgacttatttcatttattttctcccaaaacctaaatgaggataaagccattctggataagaagacatgtgtgtgtctttgtcacatcttttatcatcatgactgcttttccaaataatacaacttgtgacaaatgcgaacattaattacagttaacaaagaaatgtcatgtgaagtattcatggggggagaaaaaagaaccgagacaatcaatgagattacatcttgcaccaagcttcaagtcaaagtgcaaaagtcagaaatcaaataccatcagttatcaaattatgttaatgattctaatgaaagcttctggtattttgttcaagagtgtgttgctgtaatggtaactaatagaacaagagaagctgattgccgcgaattaattagaactgactgctggagtttcctttttatttatttatttaaatattgacaacctgttttagatctcgaggtttttcacgtggtctttttcttcgctccccaagtcatcaacctgccaaggagtgagaatgtaattgtgttttctcatactgtggatatctctcaccagcctcagggttttgacccagactgacagcagacaaattaaactgaagtacccctaacatttggggggttcagtatgagagtccagatgaggccccttgctcaatgctcccttctcttttccttcagccccacattccccccacaagaggcctttgcacacatccacatgggcacccagcttgcccatccaaggtctacccaccaatggctgctctttggctaccccttggccttaggggtgcatgcccgtggcaccatgcactattgagagataggacccagggaagaggtcattgcaggcgctagaaatgcttagggttgtttgagaagtgaattttgggttccgggtaatcataacatggtctactaactggggagtaggctccaggttggaaatgcccttgttccctggacctctttatcccataggggtgggaggggatggaggagggccagagtgggccttctaaagtgcttggccttgggcagggggctctagttacttggatctaaaagcagtaccggacatgcatattctttgctttggggtatctagagctctctcactaaaatctattttattctttctgtttttgtttgtttattcattccttcatttattcaacactcacttggcactgactgtgccaagctctaggacacaggaaaataaggtctctcccttcagggatctcacgggcttttcaaatttgtaatgcattaataaatactagatagagatctgttcaaagttctttgccttccagatctgccttgtattctgtcctctgagtgctgttcttttcttctttatcatggcagcaggtgttacagatcctgtggcagtgaggagggccaacccagggcttagaagaggggactgactctggttcccccgacaaccccccgtgctgctcctttagggctccccaggggcccttcagagctcccaccctctggccagagaaatgtccccactgaatccagatcagaagcagataaatggagagtctggcagggggcatcagtcccacagagaatcttctacagctatagtgaaaacgcccagtctaggaggggccgttctgactgatgactccaggcagcctgaaccaggatccttttgtggagcttctgcctagaaagtgaattgtgttaaaatcaacgtatcttgctctcatattaaaatccctctctctatttaagtcattgagggaatttcctaaattttccaccatggagggaaggttttggttataataccaaatggatattgacagggccttgctcttagaaaactaatcatgacatctgggtaactgagcacaggtcagctctgaagccctccctcctgggtgtcgggaagcacatcagactgtgttgaatttccttcgctggctaaattggtacattagggcaaaaacgatgtccacatttgcatagttgatttcattactattgccattattgatgcctagctcctctgaaagaaaggagccataaaagcaaataaaatcacttcgcgattccattattggataaattaccacattactgcctgcgttttagggctaaagccattccccgcatttgcatagtttatttcattatcattattaataacaacaacaataataatgatgatgactaggatccttgaatgaaaggaactagaaaaatgccagagcctcgagaagtctttatggactcagtgcgatcactaggagtccctttatctgctgctgaaatgcagccactccgttgcattgcaccaaccaaaagcttttaacagagctcccgttaaagcagttcagaacatgtggggccgggtgcctggtttgagatagtgactagttacttgtgcctactaaagatttaggttgggagtccctgcttagcccctaactagttctgtctcttcagggatgttgcttaaattctccaaacttcagcttcttcgcaaatgaaatggggattatgacacttgctctgctgtgtgatgaaaagcaaaagaaatggtgaatgtgaacatgttctatagaccataaaactacccatagattcaagagactaatactaccgtattgaaccttggaatgacggctgtggctgggatgctgtacagtggaggcagtggctagactgtgtctctttggctgggagaattttctaaaaaactaccataggtttctaaggcatcatcctctatgataagtagggagagcatacctgtgtatatttaccaatcttggatatttacaaatagcttactttgatagccagcatttctgggatgagctggtggccctgatagtgttctttcttactcagcaacttctaattatgccttgcttttctccttggtcatagaggcaagaagtataaagtctttttgtctattaattctgaggtcctgtagtgaaagcaaggtccactggtggccgtctatggtttgctggagaattttccccctggttttgtttttattattttattttatttctgctgtaccaggggctccaaaaaaatgaatgtgtcagtaaaggatttgacagtatgttacgacagtcatcaatccactgagccctgtagccataaataagcttcattcgctgccacactaaagaggacagtttttcttctccaggacattgaaaatgtcacagcgagggaattgtttgtccctgtctccacggcaacgccaccagcacttatcattaactttcacaccaagattttaatcagcgctctttgcggcctgagaccaagtcaacatcagcccaaattttcaaagccgttattctaattatgacgagaaagctatagattgatgagccgagttttctgcaaggactggtggcagttaattctcgtgacctgtgtggctcggggagtctctcttagagatggagtcttgaaagttcgattattagtgacagcttgtaagtgagaggagccttatctctccagagagtgttgataacttgagacaaggtttaactaggaagtagtgagacagtggaaggaggggagagagggggagaaagggaaaaaaaagtgcacactctatctgcagcgtgcatccagtgtaatgagaaaatatggacaggcacaatttcacaagttgtaaattctggtagccttcagttgtaaattctggtggaggctgttttactcggctatctgataatgtgtgaaaatatttgtccctttgcttcacaggcatgggcaagcactattttccagaaaatgcattaaacttcccagctctctcctgcctctttttttttttttttttttaaatcatagaccctctaaaaacaaaatgagaatttgtgattgaaatgaaatggtaactgatttttttttaaaaagattctccctaaatcagacctagtgtttgacagaacagtagaatgactatagtttacagtaatctattgtatgttttgaaatagctaaaaaagaataattcaaatgcttctagcataaagaaaagataaatatttaaagtgatgaatatcccaattacatcaatttgatctttaaaaattatatgaatgtatgaaattatcacatgtataccaaaaaaaaaaagagtctgtcaaaatgttaaaaaagactcttccttctcatttccctcagctgcctcccacccccagccttttttgagtcagtctaatttctagagatttggggtttgcaatgaaggggagtagcatggtgctaaccactctgtcccttcctgtttctgttggtctctcgtgttctctgctttcgttaacctggctgatgtatgtccctatgttcttggccatgcatagacaatgttcatgctgttgccatcgtcatgccttcaaacttgctcttgggaagtgggacatttccctctctctgtctaaggcattcagccgagccattagtctgctggggaggaggtgggagtgatggtcactgagtccccctagccaaaggttttttttttcttttttttaaaaatgatctcattatttgttctctagtctcttcctaagggagggtgcagaaaggtagcatggtgaggtcagaagaacctcatcctagatgctcccagtcccagctctcaccccagctccacccctgccacagaggaagactctcccctgcctctgttttctcatctttcaaatggtgatcatagtatctgtccagcctccttcacttatcaaatgagaatataggaatgaaattgctcatacttcatgtgatcattgcattaaagattatggtgcatgtgtgagcactgttggttgtcagcttttttagtttatcttcttttccagaactagaaaaatgatgatgcagttacattttatagtgttttctttttcaaattattttcacatgtttaaaaccagcaccattatctccattagctttattttgcccctgagaacactgaggcacagaaaggtgaggtatcttgcttgtggtcacacagccaattagaggtctaaccaggtatagagctaactgtggcctccgattcccagcttgcacttccctagtctcatgctgcttaccatattaataggctgggattaacgaaaaaagcaaacccaattagtttctgttgcagctcttttacaatcctgtcttgtttccctgtgtgtttatatgtatgttttaatagcattccctgccttttatgctgaggttgctcgaggtatgtttataatggtggcgtaattataataataaaatacaaatccatccacggagtgcgctcattactggctggccaggtaaaacaaacaggcctggcattgatgccgaaacaaggcagtttatttctaatgtggtgcctctttgaaacacaagatgctttacttctctagcaaaggaggccctgtcctctgaacataagtggacttgggggtgcaaggttgaacaggtaattgagacaccggggctaggttgctttaacatggtctggccttttcaatctctctttttccaggggagagttgaaaaccaagaggggaaattgttccctctgattctctgtagctgtaagatctttcctggaatatacaagtaggccctttggcattcaaactcttggacgtaggagtttctaatgtatacgaaagggaaaattattgttgtgaaaagagtcataggagagagagaatgtgtgtgtttttttaaatgcctgtctgtccttgttaattagaagtgcacatattgggaaattaactatgaaatactaaaaatgataaattattccttatttgaaagtataaattaaaggtttagtgtatataaaatttgtcatgtttaattgcaagttcaattaaaattcagggtaatgatgatttatacaggtttctgtgtaatttgatattcattagcttagccagacacatgctgatattagctcgttaattatgtttccttttgttgaaggcagccttgtgaaagcaatctgctcaaagttttctaaactcattctgctaaatgaatatttggcagctgttcatgttattgagatggtcactgtggcttcatttcactcattggccgcatcaatcataccttctctgtgacaaacaagggtttctcattacaaacccatttatgaaggttatggctgacattaaagagtgatggcatggtacgctgctgttactttacagtagcgttagagtggagctgtcgttaatatccacacctcccatgtggtcaacctgtttaaaatacgtaggaagggagggcgaaatcatcacagtggccctggtgccatttccaacaccatcggctcaaacttgggaatcaaaacttgcgtctcagaaggaggactattaagggagcagtgtctcagctccccactgtaggcttcccagggcttgccatacccagttcataggagtagatgttgaggtccagaaaagttaagggattcactcacggtggcatggtggctctgagcatgactcttgggcaggtgaaggggaaagcccaggttgcctgatgaagacgctccctgaagcctgtcatccatggtggtgatgagttggaggaatcaccatctgcctggggaaacagctgtgtaacagtcctgtgccctgcatttttggaggattataaatatttttacagattttccatagcctttattgtagggtcctcatactttacttgggatattgtggaaaggaaggtgctgtctttccaaaaggaaagctttgacaagtaggaaagctgaggcgcagagaagttttttgatttgtccaaagtcactgatgcagatactgactggccagagccagggccctgggcttctctgcacatcatgtgctacagttgtcttccctccaccagcaccttcttgcaggatggaactagacacttggtaaatggtaaaaatgtctctaggctgacccatatattagcttctactcatttgtatagtaataaattggcagtctggtttgtgatggcaaaatgcaatggaaatttcttacaagaagttatcatgtagtatgtctatagttaaatttacatacttgtgcattttttgggaggaagggtttagggactcatatacacatttctttttttctttgagagctgagtcttatgcattgggtctcctttgtaggctgatgtttcttttgaggtcgttgtgaaagagatggctggctagctctccatcgatgtcatcctcttcttccacagtggagcgttgttgctgggactacatcttccacctcctatccccatcttgctccacgtgggatcatgcgatttttgtacccacaggctctacacgcgctctttccccatctgccagttagaggtgaaggactcagaggcataggcaatggcagagtcaaacaaaatagaaggagcctgggcccctgaatcactgtgtggaaagccatgtactgaacatcaagtactgaatatctgattggacttcttatgagcatgacataaacatctattatgtttaaagtccctaaaatttcaggatttatctatcacagcatctagtattaccttaactagtaactaactccttcattcattctacaaatatttgttaaatattttgctctgggccaaatcttgggctaagggttgaggacataaggataaaaaagataaaaagatgctatttctgaccttggggaatgcaatcacatagtaagggagctatacaagtgaaaatattttaccctagtatagtaagtgctgtaaaatgtgtttaagggaggagaacccaaagaagtaatttttttgaaatatctagtgaaatagcagatttaaacttttatatttcagtaggaccttttatttggaatgaaatcatatgtgggatccttcagttcatacaacagaaaaaatctgaagggcctttagtagaaacaggagcctctaggctcatggaacctctctctgcatcctcttggcctgctctgatgtccctgcagccctggatgctgtggcgtatcctctgaaaacccacagagacagattcaagcccaaagatagactgttcttgcactgatgtatttttttttttattctgtaagttgtggtacatggtagctctgttttatagaatgcttatctctaataggtggaagttgagctggtggtaggtgaatagtttattccagaacttttatttggacacattatctatttgacctcgggtaggcttttaaactttttgcctcaatttcttcatatgtaaaacagcgataataatagtgcctatatcctagaatgattatgagaattaaacaagttaatatacataaaggactgtcataagcatgtcatttagtgaatggtcaacagtgttgggtctctgaaacccatgtgttacaaacatatcacatcatatttgtgagtacttctaaattttgatggagtaagcaaaagaatgctggaaacgacttcaatgtgtagggaatgatatcttagtaacaagattctgaaacctccggtagctaatctgtgatttccttttgcttctatgcaccactcaagttcttcttatggttttctgaaacttaggagggactggaatttttcttcatcgtgtttatagagaaatgtatcataggagaaacttgagttgggttttatttctttgacattgatgtttttcatttcacctccactcctttggagacctagacaatgtaacttagaactttttattttctaatttcgccactttatgtcttattaatgcattttgtcagtgtggaaagccctctggtggtcaaagtaattcctatgtggctcttttagatgagttggaataacatcaagttgatgttcaagagctgggttcaaattctatttttctcctttgctcatttctttttctagttaaactataaagtaaattttctattaaacaggtcttctgcagcattttagttctaaaaatgtctagggaaaaatagtggtaggacagttagctttactcaggttaaaatttattagtgatagtattaacattttggagggtttaaatgctgtgccgtccagtattttgctgtcactctaggaatgaaatgtaacatacactctgggttgaagatccttaggactctatgtaatgtaaaggctggaagtgggggacttagaatttatcgtctcatcttctagaaagagaaattggagcaagtgatttgctcaagatgtcagctgggagcaaagccatgcatagaaggcaggtcttctgtgtgtgattcctgtgctcttttagccatgttgcttgaggaatatcatagccaggccaagttcatcaatccctggtctctctaccagataccgaggtggccaggtctcatcaaactcagccataggatacttctgtccaggcaaaattcaactcatatgctttccatgggttctctgtctcttgtttggtgcgagacagggtgcaggattttctttttgtggtttagtgttgggagttgattggttgcgtcaatggagtaatctggcatgaacaatcaccctcagcatatcctcactattaaacagcattttttttttggagaggatgtgcattattctttactgtgtgctggccactgcaactcatcataaagatgaatgactgacaggtgacctatgtctggtgtcctaggagagtagataccttggagatgaagaaacatctgttccactctgacattggcaagaaaagctggcttgtccctccctttcctggtgctattgcatgggcttatattattattattattatttgagtctttggctatgtctaatgtaggctgggccccgaggctatttcttggtgcaccctgtgtgacatggtacaatcacaagaaagctgggaggtggcatggggggagcacagaagatcccctaatgtattctcaatcccagttcctgggcacagacagtgctacctgagagactgaggagctaggggctccagaaaggtagaaattcaggttaattacccagaatcttgtagtgttcctgggtcgttctctggatgtaggtacattttctcaagagactgtttaactctttacatctttgttactgtcctcattgctaaacttcacaagagcaggtaatgctggcgtttatgaaagagtgaacagctaataagataggaattcaattcacatggcttggtctgattcaggagttggggtagtaagttaaatcactcactgttcttcagtgagcatgtatgatttgagtccttatgctgtggctatctactgtgtcagatagaaaataaaatgtagcccctgccttcaaagagcttaaaagtgatttcattttgtgagcacttcctgagtgcctgccacatgcccaggatcctgctgggtgcttgaggctgaataagtccatgctgtcttcagcagaagttgtcggtgaccacctatgccctgtcagtattaccctttctgtgtacattgcccagccagcagcacctgcagctttgccttagagttttctctggtgactgaaccacttttgcttgggacagggaaggtgataaggccagagaagcaggagttggtggattaaaaactctgttatttttcatgggggtgactttgaggcacagtcttttctgtctcccagagctccccagctgcatgaactccagctggacacagtgggaacttgctcaacaatacaccatgcaccattactcatttcccccccttccctttctcatgtccccactctcccactcctagggtcacctccccaaaaatgctttcacctaaatccttcttccatcatctgtttctgaagaaaccagactataatatcttccatgctcttcacatgcctttgattgaagtaaatttctgatgaatgttgcagaggacatgcaaagtgctgaggtaaagaagagaatgggtgacagaatccaaatagaaggatcttggaagccctcttggaagaggttgcatctgaattagaattgtaggggttgggttgggctttgttaggaagttatggaaaggaagggcattccaggctgagagaacagcttctgcaaagacctggaggtgggaggaatatgaggcatatttgcaaaatggtaaatgtctgatatgtctgtagttcagggtacattagggtgggataggggaggtgaggatgagggaatgtaggaagaagaatgtaaggactgtaggtagagttctacttattgatggtttgaatgtgaggctgagacatgtagccttgcctttgtgggcagtggtgggctctcaaggtatcttagcaatggggtagtatgtgtcttttaggatgaagaagcaggaataatatatacacaaaatagaaacatgtcaagtgtgaggctattgcttatcctctaattgctggggaatttcaaactgaggagagacaagtgtgagtattcagagcagccagggagggatcaagtgagaggtagaagttgagtctagtgaatgaatagacggtagttaagagaaggttgaagccaggcatccaggacagaatgtgcaaaggctcagggacaggaataatctagctttagagatgcatcatgactttcatagacgctaggtacatgggcctttctgggtcccttcccacctaaaaaactgctagtagttttttttcttaatgattagattgataaagacaaacatgtataataatattatatattaaaacattttctggctgggtacagtggctcaggcctgtaatcccagcactttgggaggccaaggctggtggatcatgaggtcaggagttggagactagcctggccaatatggtgaaaccccgtctctactaaaaagacaaaaattagtcatgcatggtggcgcgagcctgtagtcccagctacccggggggctgaggcaggagaatcgcttgaaccaagaggcagaggttgcagtgagccaagatcgcgccactgcactccagcctggacgacacagcgagactccgtcttggggggaaaaaaaattcttctgcctgaagttaatttttcttttgactttaaacgaaatgaaaacatttttgtagtctctaaagtctcataggtcatgcgccccgtgtgcctgatagagaagtgagccctgccttttgggagccggatgaatcttcatacctccttgaggctaggctgaggtttccctcacctcttttcgtagagctgcagctttggcattaggagggagccttgggctcacctgccaggccctgagtgagaagctcgagggcacaatgtggggtggccttttaggtatacctggtggccggcatcagggtgcccctggagaggagcaaggggacaggagaacgtcctggagcccctgaaattgggtccggctttctatctgtctaggccacctgagcaggctcccatttgcttattttcccgtatgaatcccttgtgagcttatcctccaaaaggcttgccccgccgtgggggtaagtgaaagcttctctgcctgctgcagcatcaccctccttgagcgtttccactgtcagtgttgctagagaagcaccctcctgtccttctgtgtttcctcggaaatgcttacaaagaagcagaggtttacgaaatgaagtgatatcatccgaaaaaagcctgcgaaaagcaaccatggtgagaagactgcgcaaggatttttttttcctccttcttctcaaaaatagtcaaaacacatgcaacgcatacttgtaaaaggatcaaaaaaggagagaaaattgtagctggcagttgttttccccactgttatttggttgctccttagcttccagctgttgaaatggctagtttatgttaatgggtattttgcctctcctattcgtgttactttactccaaatttaaaaatgaacctgtgactttatttatcccatgtgctgggaaaacagagatgcagccttttctgtctatatgatttgcattgtaaggatgcacttacactgccatataagtacataaaattttcatttttgtgagcagggacatattttgagcctctttttttccagttctttctccaaagttaagaagcataattcaataagtgaatgctgtctcccaatatcagagacccattttctgctgtgatagaagatctattggttcccttttatggatctgaaattgtgattggcatgtcatggtcaagatatcacctagagtacacatccctcagttaactaacctctctcttatccttcttctcaaatgatctttcttgtaaactgggttgaatcatgtgtatttggtttcttaattatagacaaatttctcactggatgaaaagtctgctaattagtgattttaaatgtcatccagatatattagtagacaggtgttattttagaaatacagggcaacatgacctcttgtgttgtaacctatacaaaggtaaaagtctatatggtgttatttaatgacaaaagaaaaataaaatcctcaaaatacacctccttcccctcatatgcactcactggcccattgaagaaccaggttgttatcttgttatctgactggattaagttactatgtcatgactgactacaaatactatagctttatattataatgtcagagaagtttaaagctgaagaggccttagaaattctcatgtctaaccttctttttttttttttttttttttttttttttgagacagagtattgccctgtcacccaggctgaagtgcagtggcatgatcgtgatctcagcactgcaacctctgtctcccaggttcaagcaattctcctgcctcagcctcctgagtagctgggattataggcacctgccatcatgcccagctaatttttgtatttttagtagacatgaggtttcaccatgttggccaggcttgtcttgaactgctgacctcaggtgatctgcctgtctcggcctcccaaagtgctaggattataggcgtgagccactgtacctggccctaacttttatttatttattaattaaattatttatagagacaaggcctcctgcctcagcctcctagagtgctgggatgataggtatgagccagcaagtctggcctcgtgtctaacctttttaatttaacagttgagagaactgaggttcagagaggttaagtgacttatccagatcacagtttgtaggacgacctaggcttgactccatgtcttcatttcccaagttttgggccctttctaagctctgaactaggctactttatttagattcagggggcagttaccaggtgactgggctaggcagtgtgggtattctggagttgagtgagacatggtccacctaagaggctgtctattcagctagctctgcagggggatagggtcagaatataagtagctagaataccaggccagtgagttggtgtcataaaattggccaccgttcctgtggactgaatacttaatgagggagtggtcctacctcatggtatcagggaaggcaccttagaagagacaatgacatctgaagtgggtttggatgtacagattgggcttttataggtgctagagtaggtcttattgggcccattggtattaattgtgtccaggaagacagagacttgtctagaggttggaagtacctgatgattctcatagtcctgctttgtcaccatcttggctttcagctctggggctgtcaggaatgggcatggccattgccaggcctatgtgtgtgtgtgtgtgtgtgtgtgtgtgtgtgggtgggtgtgcatgtgtgtataccgaccaccatagcccgtgagccttccctgaaggatgctgctcctgcaagcaccaagtaccaaggaggctaagcagtgggtgcaggcaggacatgcagtgcctggcagcagagactgccaggcacacatggctattgctggctgggctcctcagagctctgggcctggcaagagagaggcagcaggggtgaggcagcccctacctggatgggatggctatttcccagcgcctcattccccaggaggtcacctcgtttctagaggtgctgcctcttgccttgcaaacagagtcagacctgccataaggccacaggggacttagaaaaaccgtccccaccccaccagggctgcctggcacataccctctgctctgccatgcttttctgaatctttaaaataagtttttcattaattttagcatacagtgaagggaagtaacctgtggcttataaataatggcaacagctttatggaaacacctaaaaatcaccaggggcacataacaagaaagttctccatctccaggtgcgaaaacacgctggtgattacttgttgagcaagaccctgtcagcttttttattacaatacattattgggtaatagttttaaaattatttatagaaagaaatcgagctgtgccgagaattccatcatttaatatgttgtctgtgaatctcattagcctttttagcctaggggttaggaaggaaaacagagcgttggctgtattttgaagattgagcactatatacactttttgtcgggggcttgttgaccttatgttaagttgcttctttgcgagtctttctgtgttacagctctggtttccatggtatttacataaacctagcaacagtttgctgtgtagaggcagtggcagggcccaccatctcctctgccaagaaggaggagcagcttaggatgcctgctgtgcaggccatcaatgggcaagtctctttcaggtaagttacagaataggtaagaattggggtgagatgggatgtcagctgctccccagtgtatgtgtggcctctcctctgtctccaggtgacagaggcagctccagtattctgtttttgaaacccatccggtgagttctcccatctagccccaggccaagcagcatgggtctcggcagaagctcatcctgggagtgggctgctctagagaacacgactccatgctgtccccaggcctgtgttctccactgaccccacagctgcatggccagtaggccttaggctaagttcaggaaggacccatctgaaatactcctcctaaatgaagagccgttctctggtataagagggatgttagtgtggtcagaacaaggctaaatccggaatcgggagagtgtgacaaatatcaacgaatggattattttcaaatgtgatctctctaatcagctgtgcagggtgataagaaagagcaaggggcttggacactggccccagaatggtgcaatgagttctttatacctcacaacatggcaggaacatttaaaaaacaaggtaaaaggaagtcactgggagcaaacagaagaagtgaagagctgacttagagcacagtgaccttgggcaaataaacttctataagtctcggtttctttctccataaattcagaataatggtacgtaccccgccttggtacttggtgcttgcaggagcagcatcctgcagggaaggctcacaggctgtggtggtcggtgcacacacatgcacacccacacatgcacatgtgcgcacacacacacacacacacacacaggcctggcactggccatgcccattcctgacacccccagagctgaaagccaagatggtgacaaagcaggactatgagaatcatcaggtacttccaagctctagacaacctctgatttctgtgagaacttgatgagatcatggaaattaagcattcagagcagtgtcacggctcactggggtcgagcaagtagaaaatctgggattcaaacccagacagtctagccgtagaacagtggcctttaccactaccctattgtattatgccattctttcattggtataaagaactatttgagactgggtaatttatttttttaaaaagagccttagttggctcacagttctacaggctgtacaggaagcatagcagcatctgcttctggggaggcctcagggagtttccaatcacggtggaaggcaaagagggagcgggcacatcacgtggggaaagcaggagcgagcgagagagaggagcaggaggtgccacaccctttcaaataaccagatctcgcaggaactcactaggacagcaccaaggggatggtgctaaatcattcataagaaatccacccccatgatccaatcacctcccaccagaccccacctttaatattagggattacgatccaacatgagatttagaagggacacatatccaaactatatcaactatgatgcctccaacaccttcagaagcagatgtcttgaactgagccataagcaatgtggagaatcaagccaggtggagaagaggggctttgactttggagcatagagagcatagagtaggtaagtatgaatgtgaggccttcatgggaacctgccccattcttgcctttattcacctgtttagtttaaagacgttgattgggcaccagttatatttcaacccaggcactgtgtgtgaagaaaaaaaaagatggagcagacagttcctcccacaaatagttgggagttaggagagttgtcctgcagagtaaaaagagaaaataacagctttatgagtagttaccatgtgtcaggcgtgattttgtgggctttacgtatcttaaatcattggatcctcacaagggccgtaggaagtaggtgccgttattaatgtctattttagacaggaggacctgaggttctaaagaggcttagtgaattgactgaagtcatagaactgaccggggacaaagccgggatgcgaagctgggcagcctggcctctgattcctggctctgaaatttctctctatggcctgtatgatgctaatcatgggcagctccaaagctgtcggggatgtttagtctaggggttgactaagaaacaggagaatagtgaaggctcaagattcatttactcagctggtctgcaaatttttattcttggcatcatttggaatgtgtttcagcagtgtagatgattttatcttacaggttttattcagctcagtgccatgcaggtgcaattggagcatacagatcctgtgcaccgccactcgttgagctgtgtgtggccaaacacaggtacaggaaagctcagcacctgggcctttagggttttgcctactcagtgttctaagatgtagagatatttctgtaggagggagtgatagtaggtttttggatccaaggaatctcagttagggaggtccttggagctcatctcatgaaaactcaatggcttaccccccgaaaaaggctttctgaaatctttaggcattctgtaaagttgtatctaaggttaagagaattgaaactgcagcttttatggagatgtctgcctggattagatatgtttcctctttctccctgggatgtgccacctggagaaggtccagggagcagccctgtggcttttgagaaatggttcagtttgctctggggccttctgatgcttctctgacacgtccgagtaggcagcatttttttttaaacccttgattttcagaaacgcattgtccctgagttattaataattatctctctctcctctctactctttctttctctcactctgaaaatcaacatcaacttgactaaatcccttgagttgagcttagtccagtttttcagttttcttctgcagctgaacactcaatgcttgattctcctgggggttgggtttagggccctccctatgttcccagtctctaggcctagtaagtacattgttttggaaagcctcttccctttcagtgctggctccctagagaccttcaaaacatcttgggtcagaaagtgcaatccaagcaagcctagatggtacaccacccccacccaaaagatccggatttgagattacccccaggacttttcctgttgatggcacatttgacttacagtatagtaatgtgtagtgctttttctctatgagcacttcataagcatccttcggtgatcatgacttagaaatgattggagaacctgcttgttcagaaggccagatgtttcacaagaaaatgaaggacagaggtctcccagtcagcaatattagtagtcttgggataatagcattggcaggagtctaaaagtttgtctgataccaactccttgctataacttatccaatccagccctctctatgcgctttacagataaggaagccaaagtatatagaggaaaattcccaaggatagtcacatagctgattgttatggcagagctgcgttatccttagcattgtaccacattcctccttcttctctggctctcagattttctagcacaaagagcaaaaacaaaaacaaccccaaagactagaaaatgaaacacagctcagcctgggttttataatgccagtcataggaggtgctcaataaatgcttatgacttgctgcacccccaggaagtactgcctcttctttatgtgcatagcttcgcgcagttgcaggcatgattccagcctctggagatgtctgatagggtgtgcggatgggccatgttgttccactagagtaatttcctagagagaggagagaagggagctctcattttgtatgtggtctgtctaatgcctctcacatccaataactttaaaaccaatcaaattaataatgtagggagaaacaaatggattcactctttagatatttaaacagggatatttctgccactgacatgtaaatctttaataggatatgagatttggcaataagaaaaaatgccaagttgctggagacctggttcttttgtactattttaggtccaatcattacctcctgacattaccttcctcaaataggtttatttgttgaggccctactttgtattgggtagtgtgtatttaatactgggatgtaaagtagtggaatatatggtacttaccctcacaggacttccactctgctgatgacagacatatatgtgtagaaagatgaatacaaatacagatcagtaagtgcagaatgtcagcctagttctgtatgtaatcactgctgcagatattcatgggaggaatggatgatgtgtagggctaattagccttcaaatagggaagctcatgctgtgaaatattttcacctggtcaaaggatgaggggctgaatcttgactcccataggagacaaaggatctggagagattttcagatagtcactgaagatttccagttgaagtagaaaaaagctttgtgtttgtgtctgtgtgcatgcatgtgtgcatgtgggcatatgtgcatgcaagcttatctacatggttgtatagacatttctgtcttttagattccaaagtgacttcctggagtgatagtgaggctcctcaaaacttggtttaaaaccaacctgaagcattctttattttcaagatctaaaatttctagaagctcttgttgtgaggaagttttcataaaaccatatttacatatccccttcctccttctgatccttcctggcatttaatattgataaacttcctattcccttgcccacctctattttctgtcatctggacttattaatgtgtcttaacagtaaactcttgcatcctccaattgttctcctcttccttccccccaacattggcctccttttactttttatctctttcgttttcttccactatagtgagttagaagaaccaaatgtaaacttgtagcaagtctttcttctgggttgatatctgtttcctgcccatcctggtggccagacttcccaacaatgggggaaagtcatggcgtctgtttcattccttccatgctccatcaagaagaccgctttttaggatcaatttcctccctttctggaaaattgctcactatttagaaagaagaagtgttcctactctgaagctttcaattgttgccaccttaatggtctctctcattattcccaggcatgacagcatgagttttggtttggtttgccttccttgacatatcagaatggttgagatgaccttgcttgatggaccatgggcataaaggaactggttggttgagtgtcaagaccaggaaaaagtatggatctgtccttgttgggagccctcttgtctacttgcttggttcttattagccagtttggaggttgccttctgccatcttcctttcatctgtgtggttcatcatgaatcctggcctagcttctcctccttaccttatgcttaccctttgatgcagagttccaacattaatgtctgcctttccaacttccacatattacactgccctctacttcccactgtgggcataactcactgactgcaggactgtttctccagaatgtggatgagacctcagaatccttctcagcaatgtcctgagggtagacaccagctgatcagttttatcatgaaaattgaaacctatcttctctccctggatcttaccaaagtactcattttcatcttcagcctagatgtcttgctagacttttttcttccctattctttccatctatttcctatactttgttcttcatctattattggtggtgatggtgatatccatatttatcacactcttacagtgtgccagaatataaaggctacaggtatcatctcatttagactttaaagtcactctaagggatactgatactattttacaaatgggggcccagagaggttaagtgactttcctaaggtcacataattcatcagtgtctgagctgaacctgaaacacactctgcccttttctccctgcctctgcactaccttttacttccttagtacctcattacatcttccatagtcactgaattttattctttgtcattgcggcttatttaaatactgactgtattggaaaaattaaaattatggtatccttaataaaataacattgaagagggtatagatgtctgcactgggaatattctttgtgtgtgaaacaaaaattcaacttgttatagtcaatgaagtcaatggttcagttaataatgcctctaatggcataattctgctcagtgccggtgatgggtaccctcaaaatcagagactagatttaatgacaggacatgtagaaatcagcgctgtcataaaaacagccgggagaggaactccataggagaggaaaacccctagaaatggcttgacgttattggttccagtctcataaatctcagtctccgatccttcccgtgattccccctttccatccagctgcacctaagtgttccccctttgcagtgaatgcttgcatttcccagtgagtttcctgtgcttagagatttgtttttagatcaatgccattttttatgtgttgctcatgcatggaagagctctactttctctgcttgttctaaataggagaaaataattttaaagactccttttaaggtgtcttaagactcctctgtgtgtgacacccttcagaggaatgaccttccattttagggattcccttttttgcacccctcccttacccccttgcattggagtaagtctcttgagactcactacggcctaggaccaggatgtaggccaagtggaaacacaccaaagtgatttaatagaaaaggtaattcctattcaaacgggatagtcccttattcatttcctcggattatcatcaaatttatgtcaccagcaaaggagctttattgagtttcacagagatattccttttgctctcattgtcgttagttggcacgctgacattttcatatgtgtctcagctaatgcctcaaaattactccatctacaaatgtaacaattgaacagataattttaataagattcagcttgacttcagactgcactccttcctttctttatagaatgcaaattgtaacctgtttttaaagccgtgcaatgcagtgaactttaatgggatttgacaacatcatattaagcacaacaactacgcataatgtaccgaaaaattggacgtgaaattggaaacatagctgagaacaaagtaaatttacatggtttggtagcttgaatgtctgatatcatattctctcatgcaagccccataaaaaagcaaaggatttaacaatggatatcagcagaaagtgcttttaaagttaaaactgatggatggcttgtcaaaaaaaataattgcattggttggaaagtcgggatgcgtgctgagggggagagaacaggatatacagagaggatgatgggaagtgacagtggtctgtcaggaaggactggctgcccagaggagtgtgaagccagagctataaggtggcagagtagaacaggctgtcagagcgggaaagtggctttaataccctgaaaagcaaaggaatccgcctgtcagctttgctcagccgtgctgaaagaggaagagaacatggcataaagttagagacattaaacaagggggtgggggcgcagagagcagcgcggagagcacaggcagggagtgggaaggaggtgggggaggcttcgtatgtgggtttctggatatgttctttcctattatattttcccccttttctcaagggccaacaaattaaatttgaggggctggggtttctctgcttttgaagaaacgggtgatttaagagagtcacatgctcgtcccagtggctgccactctagttgaatgggtggctttcttacaagtgcacctcgggttgccttggccgatttctggcttttcagatctacagcctcctctgctgacctttctcctcatcggagtatgcagtccattctcccagagatgacaccaataccaagtcgtcctgggactggcttattgtctgacaaagtgctgtgaggatgtgacactttagctatgtaagaggattgtgagtaaaacacaataatctgatttttttttgtaaattttttttgccctctcagcattaggttttgaataatttattattccttcttcatatactcctggcggtgaggttaatttggtcatcttgcaggggcctggctggtaatgaacatttttatatcaggcctcggagtactttctccgtaagacataccacatgtttaccacttaattgcccaagttgcttgagagtgttagcgtctgggggggttggaatatggcagtttattgtacagaaatattttgtgtatttgatcttaaaaaatatattctgagagacatccaaattcttgaactgcatatggccccaatataattttacatttggtttagtagtttggagggggggagcttctttccaaagagataattatgtcattgtggaggaagaaggtgatggtggcagtggtggtggtaatggtggcagcagcagacacttacataagcattttctttttcttttttttttttggagacagagtctcgctggagtgcagtgacacagtctcggttcactgcagcctctgcctcctgggttcaggtgattctcctgtctcagtctcccaagtagctgggattacgggtgcctgccagcatgcttggctagtttttgtattttttgtagagacaggttttcaccatgttggccaggctggtctcgaactacgaactactgacctcgtataatctggctgcctcatttattacataccaggcagtattcatttagctcccataacaactctagggataggttctattaatattgcctctgtgcagagaaggaaactgagccccagagaggttaagtaacttgcagtcattgaattagaattcaaattcaggtagtctggtagcagagtccattcttttaatccatgtgctaggtacacataggcatgtggggaaccctgaaatgccaggtggagtcctgttgtgcctctattattcttgtgtgtctaaggctttctgggaaggattttattagaactgggcatcaactgcctggaaagcaggttgagccacctagcagggagcaagaccacagagctatcttctctgtgttagccgagtaaaaagtggagcaggggagagaaaagatgaaacagtggcaggaggatctttcctggtcacaaaagttaaccaacttccaagttagattcaaaacacttgtctgaaatttttcatctagtgctctgcagagacatgtatgtttacactctgcattcagttctaggttatagtaagccggtttccagaagatggagacctgcactcctggttttcctagaacctagctggagaagccgggtggcagcccgcccacctttttatcttgattttatgcagtatactatgaaattgctcactaaagagattaattagtggggtcttcacctgggtgtttatgggcatgtttggcagtttgggattgctcccgtgttcttcaagcctgcagggcacgtcttgtggattgcagtggtgtgctaccacactctagcacccactcatgctgctgttattttggtttcctgggcctgtaactttgctgtaaacaagcaaaattgctttctactcagtgggctgtttcctgacacagcaggagaccttgttgtttttctcctggaaatctctgggcttctcctatcctatctgatacttagaaggaacccttgcagacttacatattacagtaaggcgcacacttgtcacggatctgggttgacttcagtgtgtctttaggaagcctcccctagtgctccacgctgccctctggctgcagcaaacctaaaagctggagagcaatactgccagtctcaagttgcaccatcagggacaccactgagatttcaactcttgaatcaaagaatttaggattggaatggatagagcttaactagccttttcagtgcctcagctcaggggtctccagcgatagggaattcattatacccagaagcagcacaagccaacttatctgagacaagtagggtttgttcttaagatgagccaaatgtgtttctctagaatttccatccattggtccttttcctaactccctggggctacaaagatcccaggtgttaaatttgtgcatcccataaaccactgtaaaactgtataagtcttcagcctgtagagatctgcctgttttctccttcacttgttcgttccatcatgttcaatggagatattaatagctagagagagcttctatcaagactcttccctcttcctcttctcctcacttcttccttccagcccactcttcccaaccttgctctgcactttttatggctcacctactctttcaacagaatccaattccttgctttaatttcaggtagccctgagtccagaatttaggtgttcgaggaaggacctcctgaattgaggtaagggaataagacacattccccaaaatgagactgtaatcaagtggtgctatttccactttgcaaatgaggtaactgaagtttagaaaggttaagttacttgcccaaggacacacagctagtaaacagtaaagtagatttggactcaggtctgccgacaataaagcctcagctatttacaaagcaggtctaatgtactggttataattatggattctggagcccagcaggcctgggttcaagtctccatatactaattggtgaccttgggaaagttatttagcctctctgtatctcagtgtcctcattggtggaacagtaataataatgctacctgcctcacagggttgttgtgaaaattaaatgagaaaaagcatgtaaagcagttggcacagcacctgtatgtgataaccactcagtaagttttagtttaacatcatcatcatcatcatcatcatcatcatcatcatcatctatttttaaaattatgatagagaatgtcagagctttgcacggttggctatggagcctgaaatgtggccacctaactcttggggtggggggtgaattcacgcggcagggagctgcaaataaccctttggtggatgctttacaatggaggctgggtggggtctgggaagagtggcagtggctatgattattattttttagttttgggtttttttttttacactttgagaagattgctacagttatctggaaatctattgctcgggcaaaagcaggattgcgtgatacaatttaaaaggccggcagctgcatttcatccttttcacaagaaaataaccccttactccagtgaagctaaaaataaaaatggcagtacatttggcaaccacgcttcttcctttattacctcagcagtatctgaataaaatgtcttattaagcaagatataagggcaatgaaagggagagtaagtcaaattagttgacatctaaagcatggtgcatcatataccgcgagggtagttactgtttagtaaaatggatttaatgcttaatataaatgctgatatttagatggctatattttggcaactcaggaggaagagaggtggtttttgagctggtataactaggttttaggtcctttcctgacacaaaccactcatgtggcactgggtggcatgctccataaccttgggccccacttcctccatgtgctaaaggaagggtgttttctggcacccagtggctctgtggcaggatctcagggtaatctgggaagagtggcaaaaacagggctctgaatacccaccccactcagacaggtgcaacactgcctgtatctgctttacatattgggacaactgggtgagattttctttggggaaaggattacacgaataaaacataggttgtcaaaccaccagatttgattatttctaaggaaccctacaattctcacctttgaaagttccaccatgccaagtttgaactggctctgaaagcactctgggtcctgtttcagctctaccacctacagtgcccagaaaggacctcggggtccaggagacagggcagtgcactagatacagcacaaggtagggtgtgaccagggaagaaaagtggtggcaaatcccattataaacatggatggatgcaggcttgtgtgcctgtatacatgtgtaagtgcatatacaagcatttaaatgcatgatctatgtgtgtgtgtgtgtgtgtaaatgaatgcgtttgtgcatatgttggtagaattcatgtacaaatcggtttcttacatttgtgcatagagaagatgtatgcacagccataccatcgttggccaactgttgtctcatttatgccagccatcaccttggtgggttaaccttcattttcgtggttgaagtgaggaaactgagtcttacagaagctaagtaacctccccaagttacatggctaacagtttgcagagtagagggatcatactgtattaggtatttgttttatatatgcctgggatagtgccttactattagggccctggtccacatagccctcaaatttctgtgtgatgaggagagtctcatatatgacagggaccactgtgggttagtcttttagaattttggttttgtttgatttcttgtttcattacttttgggatcctgtagttgagggttacaatgacatagcatgaccagggcttatcccaaccactcttttcccaaaaatgactaaataatgtcgtcaggagtttgttcaggatttccttctttgagagcttccttccaaaacttcttttgtgacagagttgggagcctattgaaaaatgaggctgatcagtcacaagtcctattatgcaaagtcattcttaggtactattggcaagtaactgaatgcaatcctagcaaagaccttaggaaatcttgtttccttttattcataccatgaagcacattgaagactgtcagtcatcctgcttccttggaatcatatgctgagaggcttttattctgaagaaaatcatgaaacctgcgaatagatttatgctctgcttctaatggttcatgaagcctaagtatatctaataatagttctttcacctgatttgcctaagactaagatcttgtataaacaactctcaccagaaccatcaatcactgtttaggaatttaaattttaccaactaaaatgagaatggaggaagggcaagctgttttctgtgttgagcttaggccttttatagatacaacactttggggaatttctcggtgtcttagttggagatgaggagaaactggagcctttgcacactgcaggtgagagcatagattggtgcagccatttggagaaatctggacttactagctaaataaaatatatgtaatgtatgacagaggtcaactcctagatctataactcagcaaagttttatggtaagcagacattcgatgatggtgatgatcatgtctttgttgctggtttcagtgattgtgactgttagactgaaggctatttgagttgtagtttattgacaagtggtcaagacccttttcagggtatattctcaataagccatttgtcaaagttgctgagagagccttcatctatctccactcctatgcttcatacctgctatatattctttgagtgcaatgttcatttagttgatgttgctggaatgtttttgtgagtgttaattgtgattcttagaaaagaagtaatcttggacattaaaaacatagaatccccaagttgagatttgagattatttaattcaactaataagcctaataagaattccagctatagttattcttataggtgatctgcttagattctcccagtactgggacatttgccacatccagagttattagaacattctaccagggacagatagactacaaagtattggtactattaggcaaagttgcaggattttgccaactgaaaccccaaggcattttctaaggaacagacaagagacaattatgccatcctatctagttcccgctactgcatcaatttgcttgggagctaaaactgctttttactctaaaaacaagttgaaaaacctgagtatctctccagggtggaatcagctgcatatacccagggagataaaacggtctgaagatgtcatgggcattgtgaatagggacagcagaggttacatccagtgtcagaagtcagtcaactcataggcattcttgctgaagaaaagaggcaggaaggtcactgccaaatgtgaccttgcctgaacatataaataactgttcatgtgtctaaattgtcatcattaattaagtagtgtttcatattaaaggctctcagtccagaatctccgttactttatagatgtctgtagcctcatgaagacccagatttctaggatatcagcgggggaatcatctcaaatgatgatagtaatagacatcttggtccctcaatagaagatgggattgccaaaatacttctggaagtcattactgatgttataagtcaaggatctgaatggaaggaaaatgcaaaaccagaatctgtattatttccttcctctaagcttctgctcaaggaagtccacccaagaatgctggtgcatcagtgagactctttagcagagagaagagattccaggcctactgatgcttggaacagccactctcatcagcaatactgagctacctgcttctcttgctggggaagtcctgtccatggagccggctttaccagctgtgcagtcatactcagggtgtgcaatgttactgatttaggagcccatgttcacacattaggatcaacccaaaccatcatatcctattgtatgtcttcttcccctcaccatgtcaaagctatgttaggtcacgaaatccctgacagctcagtcacacacagagtgcccagctcaacaacagaaccagaggttcatgaagtcagttttgctgttattgtgagaaaagacaaattgcaaattatctcaataaaaagctgttatcatttatatcaataacaagttttttgggttctcatttcaagcttgattatattagtacatttatagtgtcttttgttttttccctgtggctgtactttcttaagaagctggaagactaataaacactgatgctcttttgccacagatttcatctatgattttgatttaaagctttctgatcagtatagctgactgatcaagccacatggctgcaaattacttatcttgggttctccttccaattgggtataatagaggggatggctgtagagaaactcattaaagaactcaactatttgggaagctgaggcaggaggacagcctgaggccaggagttcaagaccagcctggcaacatggggagacttctggtctacaaaaataaaaataaattatctgggtgtggtagtatgcacctgtggtctctgttacttgggaggctgaggtgggagatcacttgagtccaagaattcaaggctgcagtgagctatgattgtgtttctgcactctagcctgggcaatagagtgagactctatctcaaacaaaacaaaccaaaacaacagaaaaaaaaaccaatgaaaaagaaactcgactaatctaagcaaccagcctgagtaaattatctgcccccttccatgaaaccttgaaaacataaaatcatgttgtttattccaaaggctagtagttatcactttatcttggctattctaaagtgcagtacttttgtgaattttgctcattaagtaacttactgaagttttatttaggagtctagaatggatgataatgttgaagattgttagggataatgtcaagctacttgacataatcaaccaaaaatgctgtatatgaaaggtgttttgtaaaccattaaattacttaaccaaagccttagtcaagaatcagtattaattcttcagaatcattcaggcgtagattccttttgaaagtgacttaagatgctcacagatactctagttctagccctttctgaaatagtcacaggtgctttcaacacatggctggccagatgctatcatttctgacagtgggtctgaatttaaggaagttgtggacaggaaccttatctgagctgtcaccatcctgactcatcaccttcaagcaaataatcaggctaaaaggataggctactgggacatcctaggaggatgctagaggagattggccaacgagattcactggactcttagtctctcaacctgtcactccacgctcatccatggaaattggctctgattcattactaatggagaaatagttcaagacttgctttgcatccctacacctatgtttggatgaggacttcaagagtgagaatacatttcagatacagttatggctaaattgtagtctttgcatgaaaaagaaatgacctggtccttgttaagagcagtggattcagcccaaggtggtttcctgatatagcagttgaagttgcagaagattcagagtgcaatgtatgtccctgcaagatactgtagggccagtaatgtttgtagcagtaattcctgtctggtcatgcatctgctagaatgtcgtatctagtactctgcacccactaccacctcgtagaaatagcttcacaagttatatggaggattggtgagacaggtgggagggtattcgctccaaggaggagaatgctgtgagatagccattttttctgcctttatattcttgttggggatatgttttttaggtgcctgtagctgtctcctgctgaatgggctttgttcagagatgcatttgcctgtataagggttgtggttttagaagactgcttatctccctcctagttgctcactcttacataggacagccatgtccagctgtaaaggtaatatactgcacagctgtaaacagcatccctaagaacaagtacatcaggaaatgtcttggggttcctagtagcagttagtgatgagaggaccaagcagctccagccttcttggttagctctgtggccttaggtaagctattcaacaatagtagtccttcatttctgagtctgcaaaatgtgcatgggtcctgggtaaggagaaggcatcacctgctgacctaaggaaagtgaaatatgagtgaatgcctttatgctttctttatggcataaacatgttaattacactcattacacacctcagagtgtccagtgccagcctttcccctgagccatttcctttgctatggacctttcggttttctgggacactttggtaaaaggatggagacagcaattaaatatgccttagaattattgtcattccatgttttatttttgccttgggtgtctttatgggagagaggaaaggccaggagaggtatgggccagtagacccctggctacccttggaggtgtcctttctctgaaccttgagttgaaagcatttatagggaaggaaaaagcttagatttcttctgtttaaatacttttcttccaatagaagacagagtgtgtgccagtgccagagacctgggtaacagtgagaaccttgaagaggcagtgagggcataaagggtgtgctcctggctagtggggaagagagacaagtttggtgcaggggtctaggtaccactcggccagcaggatgggcactctcggtcagtgcctgcaaatggtgttgatgtcagtttcctgttcatctgggaatgtcctggcaacacatgctggtttgtttcaggctaagccactacctggaggcagtgtgaatgcgaagaaattgggttgctccctttttcttttagaacagttttcctcttaaatagttctgtacaacagttggagccaatctatttataactgagttttattgaacctgatggggcttcactctcattgagtccatcagcggagatttccctcttgggcttttttcatggcaggagggtttcctggcttaatgggtgctctgtcactagtgctcctggtccctggtccagcttctctcttggtttgctctcagtttctcatcccaaagggaactcactacagccactcccaaagaaacaagaatcctttttctttcccgtctccatccttcccttactcctgccactgcattctgctactctctccccacaaattccctcaaagccttgaggatcccaagaaagagaagggcaagggtgaaaaatttaaaactgcccaagatggatagtgaaaacaccatgcataaataaatttcagcaaatcccccggatgaacaatgattgtgtggttgaagacctggctgaataagtgtgtcaggtactgattggaagcatgataaatgcaatgacctaacaaaggattgacttctcctgcagacaggccccttttaatggatggaaagggaggaagcttcatttagaagggaaaggctgtttgctgtgcagatatgacaaaggggaagtagacaaccattgatttacgtttgggaatgacagttgaaaaattcagcaataatcatgacaaatgagaagagatgcagtcagaggaaaaaatgtcaatacgttaagcctgcaaagaaatgccaaggtcacagagaaaggttcccaaacttctggttttgacaaccttaatggaaataataggaaagatgagggttcaggttaaaagggatggcagggcatgaagggctgcaggtgtgggtaattagtggtgagtttggagagggagtggcaggaagtccttctcccaccactgggaagccgtctgtccacatgcaactgaggtgcttcctgctgctggcaggcctgccctcctcccagaggtttggaaaatcaggcaagttattttaatgtcagtagtgacagcagaaagagagaatgtgggctgggtgtgcttgtgatgcttgacggggcacatcaaatcagaggtttagctctgatctcaggactgcagtgtgtctgccccctcatttttatttttattttattttattttattttgtttaaaagactgattataagtgagaggcagtgagctctaggttatctgcctggttgagtttggtaagatgtctccttgttttatatttatcattgttgtaaagcacccggtacattgagtcctacatttctgcactctaataagagaggcacaatccaggatgttctgtctgtgggcgtgagaagtgggtttaaaaatgtgcatatgtggatagggagggaggtgacctgggaaggtgtggaggaatcctcagacctgggtcattgtttactactaactctgtatgtaaatgtggacaatttgctttacttctccagagtctgacgagctcatctttaaaatggagaaattctggagggaaaaggtttctgacattctcttcctggtatataattccaggattcaatattatatctagacatggtgtgtggttttaggcctatttgcatatctatttgtatatacaaatacatatctcacatatttacccgcacatatctttttgcttcactgtgttggtctgtttgggctgctgtaacaaattaccacagattgggttggttataaacagcagatacttatttctcagcgttctggagactgggagatccaagctcaaggcagcagtaggttaggtgtctggtgaggtcttactttatggttcatagacagcgacgtcatattgtgtcttcacataggggcaaacaaaatctctctgaggtctcttttataagggcactaatcccattcaggggggctccactcttatgacctcaccacctcccaaagatcctacaccctaacaccatcaccttgtgggttaggctttcaatatatggcttttgggacacaaacattcagatcatagcattcagccatgcatgtatttcagtattttagtctgcagttaacactgtcttctcatctttattttggtttattctcatctaaatattgtttatggacttaaccctcaatattataaaatcatccttctgtttactgggtaaaaatgatgactcatatagtttttacttttgggggaagaagccctaacacccctaaaatacgtatattgtgaaaccagttaccagttccaagaatgacaagatactctctgtgggaattcttcagcttcagacaacgtttgaactatgactacatttttgctaaatttgttgaacagagataaatatttttaaaatcttattttatttatgtgaaatcatgtgccaggaaaagctccaccctaaatgaaaaatgattttattttaagccaagcaactccttttagataagccttgaagagaagttatctcatttaaaagaatgagccattttggagctgctgttgtatcacaattcctcttgtcagccgagtagcttgggggcctggccctcacagggttatccccaagccttgtgtcaccactggcacgtggctgttttcatttgaattgtttgagcatgtgaaagttcaaagtaaagcaggtgctgtgtttgaaagcaacactgccccccgtaactcaagcatgtgcaccatcgagttgccaaaagctctccaatttccatcagttaagacaccctttaaaccatagaaatgaaggggggcaggactgggttataaatgagtgggatctggtatttgagataatcttgaatctataatggtttcttacgacttcacttccacctggggctgcggagcgggcgtgtaaggaaagaagcctcttagattaaacattttctaatcagctttatcactcatatctgaatttatcttatttgaggaaaatgccaatatattagcaggcatgtatgatacacaaggtgaccctaccaacttaatgacataatacattatccttaatgaagtcaatatcttgtcttttagctgtctgtctattggggcgattaattgcagtgtcattaaagttagctctcttttcatttgagcttgacaagtcgcataaaactaatgttcttagttatcagctactggaataggatggaggatggaggaaattgtaggacaaataaggggtactgctacagctaacttgaaggactttttccagtgactgtttctttaggtctctcctttcccaggctctcttgttaggtgaaatttaaggcaaaggtagatggctctgatttagccaagggttcaagaaggagagaagaagatgctactgagaattacacccaatttgggagattttgagccatttagtaacaggagcttgattactgtcagggtttctccactaaataaatttgccacgttacctcctagaccaagctgctagcctagcctgagagaggagccgataaagaacacttgcaaccatgttttcatttagctttgaagtttttctaatttaacaggctttttggaagaagggaggactgaggatgggagaagggatttgtgcccgaaccatgctttgcaaatggttccaataaacaccagctcatcatgggcaatgtgggagctatagcgcctggtccggcactaattgtgaagccaaagcatcactccctgccttccccctacctctggaactacgagacaggatggctgtaatttacagtgtgttatctttgtctatagcggcaagatgatatgaagtaaatcaaggtacgagtaatgaaagactgagaatttattccttggagcacactttaaagtgtagtatctgttatagtggcactgcctgaagaccctgaaatgagacttggatgaagggcaataaagcagcatagaggctcatgttaatattgtttgtctgaggttagtaattgggttctactgatgagttgtgtgaagacaaagtgagaatcccagctagtattgtaaatcttacattgttggaacaagaagcaatcctaacaaatattgatcctctccgtgcccagaggcgaggagggaagcagcgaactgcagagcactggcctgtttcaatagcaccaattaccttagtgaaaccagcgctcggcatgaaatcccagggtggccgcaaacgatgaattagccatgattaggctttttagatggatccccccaaaatcatgccagcttaacattctgtctcaattatccttgtggtcctaaaaacatattttgtgtgaagtgataccttccagtggtgaggggccctggacctgtgtgggaaccagatgcaaatatatggccagctgctgccttcaacacagaggggctggagtatgtgcacttgagagtgaccactggacagatgcagctttccactctgaattcactgaacaccccatatttggggacacataccccacaagcatttgactttgttgttgtttttggttgtgttgtgttctgttttccctatttgtcgtgaattatgtcctaaagatccttggagagatgttctccaggggagaaaaggcatatctgctctgtgattttggggggctggcttcctgttcatttttaatgtgaagatctgctaaaggtctgtgctcatcttgtttggatacacagtctccttcctgggaatcttccctgagttctcactgggttgcattttggacccatgggaaagagagagtgttgataaaacctagagaggtcacattccactttgttacttcctaggagttcgcagcttttctctcctccattacctttggctgtgagtgtgcagtcagtactctcagaggtcattcctcaggccagatccggactttgggctggggtgaactaggtaggtatttggctctcaggcttcctagtccccatcctctgtacagcatcaaccttgtgcacactgcccagccaaatggctttggctgggagaagagccttccctgggggacttcaaagcatgtatttggtctttgatatgacactgtgacatgtttgtaccaacacacgtgcctttagcagaagaaagataacatcagaccccccaaatctggcagagggtgagcaagagtttggatgaagagaactatgcaccttctgggactaaaatgggagagggcacattttcaggattccacgacccagtcattaattaggtgatgaattcaacagatatttattgagtacctaacttaattctggatacacagttgagtaagatggagtttacattctagtagtgggaggtagcgatggtgatggaatataaacaaaataggggcaatttctgatgtaaactgaaaaatacagaaggcattattggggcagtaagcggctgggggtgggaagggcgtgttgataaccaggtggactgaaaggcctttgttctcctcatactacacacctggcatctggagccacctgtcccctcatgcatctgtgcccagtcttctttctggtggttgctctcacactgttctgaggacagctgaagtgccctggaccccatgtgtctgttcattttccaaggctcaggtaaaaagccgtgccttccacgaagccattctggtttccaccaactaaaagtgagagtttgcaccctgagttcctgtgtaacctcctatctctgttccacattggcacttggcactttctgtcttgtgttagagtagctttgcgtcccatctcatcgccactccttgcctgtgagttccttaagtacaggaactatgtacctataatatcttatccctgatatactcagcagtgtcttgtgcttagtaggtgcttcataaatattcattaaataaaataattacagagaaaagctagggaaatttatggggtgtgtgtgtgtgtgcgcgcgcgtgtgtgtgtgttgagggggtgtttgaaatagtctggggtttgatctaatacatagaaatgcttccatgaaatagaaatgccttacagttgtgtgtagctatttcactgagtgggtttgttatatctgaatggactagtgatgtctgcctgcctctctgggtaacaaacacattttggagggattgttaacttgaaggttgtaataaaatctttaccactctgaacagctagcattggtgtctgctaagggggaacaaaggcaaaacgtagttctgttggtgaaaatagtttgactgtgtttaaaaactaatcattctgcaaatatcaacaagctcagcagatgcaagctagccaccttatagtttaaatggagcccttcacgctgtattggaaatgccgccgcctccagcccaccctatactccacaggccagctcctgctcttctggccaaggaaaggcgagtaagcaagtctattgcccgttggcctcctgagacacctctgaggattaaataactaatgactgtaaagtgctctgtgaaaagagagtgctctataaagtgttattgttggggctgttaaaaatggaaaacgacttttaatttagaaagagaacactcagcataaggaggggtggctataaagcttttatcaccactttgctttcggaggcttcttagctgttggtgttggcgccatggtttgcttgcccaggggttctgtcaccgttcatggggtttaggaaagatgccagcatctcactggcatggtgccatcctgatccccttcctgcattgtaacctcgtgggcagatctgcgacttgattggcttgggttgcctaacattgattagaatttcctaagagcgagccacctggaatgtagagtatcctgtgatctggtagcttcaggaagcccccaaagcagccatgcagaccacaaaccacttgtaaagattggggactgatgacaatcatgccatgtggacagtatccaggccctccttccatctcttgaggaataggactcagctcctctttctgttcaatgaggatattgagtttttatcctaaattcagaatttcaccaactccttctaggctccttgttcatgtcctactctctccatgtcacatttatgtggttgggaggtttaaaatatagtgttatacctctgcagtctgtattattattttacatattatacattttgtgtggatttgtaatcacagcgtgtagggtttgcttgggcaggttctcatttctaacatgtcatcctgccagtgggatggaggctctctggtcttcttcttctttggctcctctgactccaaacacttcaacacctacccttcctcagcgacgtgcagccccttcaagaagagagcccataaactcagtgtttatcatacaaatgtggtgatgtgtttgcatttttatgacccagctaagtggtgagtattcatttgtgccacctcaccccagatgcccatccagaggctgagctgtttatcatgctcatctctttcccaaagcctgaacaaggagcttgggaccactataaacatgttccctttcaataaagaggaaattattatcatatattttggtaataaccaataacatttcaaattacttacatttatggcttataatcaagcttatgcttaacctctaatcctcatgaagctggtgatgatgggctcggtagttaaccacttgcgggaagttaagggcaggtagaaatccacctgaccagtaattaaccagagaagcaacccatttctgcagttgagattataaacactgtgcttggtttatgtttaattggcaacaagtgaggtgaaccccattagttttgcagtgatgccctggaggatttggcctggtcaacttctcatcaattaatgtgctgatgagggatgctggttgctgcacactgggtctttgggttcctggtctttgtttctttagctgagcatttgaggagattgcttggaacatagttcatggctggcaattgaaggatcacagagacattgctctctctgtaactatgtgttctgattgcggttttcagtagtcttttgtttgaagtcctatcatccatgagtctggatttgtgtgggatatgaactactgtgatgctacaagtcatgtacttagattggcttttgagttgaccattcatttggagaggcttatataaagaaatgggccactttgtggtcaggccatttttgtctccgagtaggttaggaacagggatccaagggagtctggttccaggatggatgtttcttaactgttagatgaagttaaagggttctaaattggatggcttagcaaaagcacccactgatgttttcagcaaaaaaaaaaaaaaaaggactatgagatagaatcttccagagtccactcttgtttcactgctttgaggattatacctttaagcacattttaacttctaaatcatcccaccaggaatctcctatgacactcatggaggagctttataaacaacttagtcatcccaacaacctgtgatgaaagtactattctcccaccattttacagatgagaaaacagaagctcagagagcttcagtgatttgtcctaggcaaaacatctaaaaggtacacagccagaaataattagttttgtctaatatcaaaactcatgctcttaactgctgtactttattcttacttttatgtcattagaaagaaaaatgtcccaagcaagtggaattatcatggatttcctctctgttatagaaccaagaatgtgaattgatctcctgtgatatgttagctgctgtatttgggactcagtggcatattgggagatattgacatattaatccaaatcaaacagttcatttttggatgataaactattagagattatttgctcagtttattagcaccagtggattagagattggccatggttgcttagcttcatgaaatagtagggctgaaaggagctttgggtagttatctagctcaattcaacacttattcaacaattatttattgaggacctgctatatgctcatgctgcatgtggttgtatgctctgctctgctgtctcacatacacttataatcatgtactacaatgttaacattttgcttaaatcgctatatatctttgaaagaaattgaaagaagtgagctttacatgttaccccatatttgtcttttccactgatcttcattcctttttgtagaagagaaatttcatctggtaatatttctttccagcctgaataatttctttgaatattttttcttttatcagctttctggcaacaaattctgtttttgtccatccaaagttgtctttatgttgccttcattttcgaagaatattttcattggatataaaattctgacttgatttttgttgttttagcagtttacagaggccattccatcatctctggcctccattgtttcttatgggaagtcaattgtcactatttaatcattgttcccacatgaagtatcatttttctttgcttttaatattttctccttatctttgattttcagaattcagaggttaatattcataggtatgattttctttgattttgtgctatggatttctgtaagtttcttctatctgcgtgtttaagctttttgtttttaccaaatttgtgggggttttttgccattgatcttcatatatatttttttctgctccattctatttttttctcctactgagactctaattgcatgtatgttagaccatttaaaatactctcataggtcacagtgtctctgtttactgtttctaaaatcctttttttctgtatccttctggttagataatttctattaatctaccttcaaggtcactgaacttttcccatttctgttctcctgttaaggtcaaatcatgtgtgtgtctgtgtatatacacatatatatctatatgtatatatatataaaataaaatatatatgtatattttattataaatattgtgctttttagtttccacattttctttggttccttttaaaattctagttctctaatgagaattcccttctatccatctgttcattcattataatcatcttttcccttaagaccttgttcatgcttattacagctactttaaagcatttgagtcttaattacaaaatctgggttatctcaatgttaatatctactggcttttaaaaaaaactcttgactatgggtcacattgccctgtttcctattcttatgttgtctagtaatttattgttgtgtcctggacattgtagacaatacattgtatagacactgatagattgcaatttctggtattacctttccctcctccccactttttaaaaagcatgctgagattttgttctagcaggcagctaacttggctggactcaaattactaattgagtctctcatgtggaaagtagcccctgaaatctgtggtcagttctttcagacttccagttgttacttttcactctgtcttgtaatcttcccagcatatgtgcagtttagggtcatctcaggatttagttgtaggattttgcagactttgtagccttaccctttgttgttctcttctttctgggatcactcccttcactttccaactgttctgccagtggcaaaattcatccttaaccacccaagaagaagcagaaaggtgacttcctgcttgcattttagccactccatcttgcagacttctgttaagggccagcttccatctagcttctgtctgcttttggtttctttccggtacccacatgtagtagtttttagaatattttgtccaaattttataattttcatcaatgggagggtttgtttaatataagctactctatcattactggaagttgaactttagatcttctcattgtttaagagaagacggaaatatatagatttttctgtgaaatctcttgattatttactctgggcagctacattgatatttaaaacaccttgtgtagggaaaaaaatcatgcctatgggctaaatatggcccctagaccctcagtttgcaaaatttgatctagttcagcttgccattttagagatggggaaataagttcagagaggggatgtgacttctctgaggccatctggtatatcattgcagattttcaactagaactaaggtttctgactttcagctatatatctcttttgttaggccaagttattgtccctttctctgtctgctagaataggcaactgctcagatgcactggctaggattcccatgggagacatcagagaataacccctgcaaagagtgggaaagcagtaagaccagctggagaaggagcaccatcgtgggccattactggactgcttttttctcttccacttggcccacttgatatttggggcactgtgaggacaggcagacagctgcctggtggactgactcagtcctcctgaatctagctctcttccagtcattcttatgtttaaggttaccaattctccgctgtgcccatgtgagctatttgatgttctcatccaaagcactgtcacgctagataacttttttcctgaactctgtcctgtcaccaaatgtcactgtgcccctgtgcagggagacatggagcatctgactgcacatgggccttgggatgcttctctcataaatggcagatttaggaccagacaaggaattggtgcaccagccataaatcctgagaagaataatgccagattcatctggctgctggcgtttgatttgtgggtgtgtgaaaggtcgcacaacctcttagaggagtatggtggggaaaatatggttcggattgcccatcctagctccttcttgggctttggatgctctacaagtaggcaaatggaaacagtaaatatttgggattccagatctggtcctttcccattttataacattagtaactttgtccttaaaccttagtttccctttctgggctcctttcatcttctatggtagttacatcccgcctgctacagactcctctcgtgttctcggccactcaccttaggcaggggtccactcttaggagaagatcttatgtcagccacaaacccccagtgcaacaacactgcagaactctaagaaacctttcaagacttctggttgaacaccttcacgtcacataggaggaactggggctgaaaggaacaggaagccactggaagcctgtagctggttaggggcagagacacatctggaactcagttttctaggccctgccccacccatccagtgcttttcttcacctcactggaaccattttgctttggcgtgaaattgtctaaaccattttatctggggtaaaaatcctctcggcctaagggtggacaatttgccccaccttctcttgcccttaatcctagtgtggtactagttttaactgtatgaaattgccaatatctgaccagtcttgacctacaaaaatgtcagttttgtgcggttcaacctaattctggcctttttctttgggtgagtgttgatttgggggatgagttggctcaggtgaccggaacatggtgctgatgagctgagatcacaggtcagaggactgtgtagctttccaagcttgtctgtttccccatgctagttcgcaagcctcacttcaggcagccatcctgacagcagtgctcccattgctgggctccggatattcatgtaggcaggtgcccagagtgcgaggaggcccatgtccattccatgccactgcagtagaagggaaggggagggacccttgggtactgatgagcctgactttgagtcctgggtctaccccttttagctgggtgaccttgggcaagttcttaagttctctggtttttagttttctccttttaaaatgagaataaaaagattttcttcatgatttgtgaaagttaagtggcacgatatgcaaaagtacttggtcagtgcttggcacatagtaggggctctataaacagttatttccgaaaacacacacatacttcacggtaccagagtgctgagcctttgactttgggcagcactttgcaccaattcatagatctctcccctttctgcctgtctcttctgaatcttagagctcgttgtttcaatgttcttgctcgattattggattctgtagataaagttcgtcctcacagggagactgtatttttgttgagggcagtgatattatttgggacccccactattacttcttcagccttaggtccatagaagggccttgaatgaaataaattgttgaataaaacaagcttctttgcagacactcacatgcccactgtataatccagtagagacctccccagcagtgtttgcataatgttatacgttccagccccacatttaatggttggtgattgtgagggttaaaggtggcttttctcaaattgtagactggctcttagagtctgacaccagcactctatgtcctttgaggggagaattctccttccacccatagattatcagagaatcccagccaagttccaattgccctgtgataatgcagtactttgttcccgagcaggttaggaactgatatccccattatgtggcatatcatgaaatgaatgttattgttaagtgtaaggacagggcatattagtggtatcttttattacgcagtcttcattataaaagaacagctattgctaaagtagtccccatttgataggtagtgggacattgttcttgtgttgttggtgctgattaaggctgggataatgcactgttcctgcctgttacgtccatcaggaaacaaggccgaccaaggtaaaatagatgagcgtatgttggcgacagattaaaaagactagtgtaaagtccattaataattctcatatttaggatttggtttctactgtacttactgaatctgcaacatttaatctcttctatgtgagaccagctgagagaaccttttctcccccttctgagtgataggcctggattttccgagacagtgcatttgtctgtcaggacccatggctgctgtggtgatttacttgccatcagatgatgttggtgtccggttggtgatatagccttgctggatatggggaaatttgttacctttagctttgacaggaagataattgctgatggttaacagaactgagccaaatccattggtttttcagtaacacaagcataagactggctttgagaaccctgcttttccctgcatacacttcaattctaagcttttgtgtgtgtgtgtaaaatgtgtgtgtgtgcatgtgtgtgtttgtatcttgagggaaatgcaccagactccagattattctccttcttttaaaaaaaattgctgcagcgtactagcatgaggcctgaagaagtgtttgttcactctacaaagaaaagaccttaggtgagttggaagtgggtgtttaggaggggtgtcctggaataccagaagcagctggccacttgcaaaaaaggtttgtcgttagtagggcattgttttgttaggcatctctcctgagaatacataaatctgggcctccatcatgtagcttgtcaatttgtcttcacactgtgcaatcaagtgattggttcaacaatgccttgtaatgtttgagccttgagggcttctcagtaaaagtcttaaaatgttggaaagaaacttagaaagtctcaggggatagccatgtgcttcaaagagcagcgtgcaggttctggacctgggatgatgatgggctcacgtggttttcctaggcacaagggttgggggaaggccatggggtataattggaggagtcttaggaagaaatttagagaaggaatagaactatcctctagcccttcctctctcatcctttggccattacaatgaagggtccctgggaagccccaatattatgcttctctccttgggcaccctcgatttggagcttgtgatgatctacctcagtggcacaacaggctttgaaaacacccatatttacccatagggaagcttgctttttgaggaagccagagatgcaaccttctatctgcaggtactgtgtaccaagagcaccagttctcacctcccttttcttctgccccaaggaaaatttccattttgccccaagatgttgcgaagagggcatgaagtgtggatactaccaaggctgccatgtgctagtgtcatgacgttttcttggtgacaggaatactctttctgaagcccagagaactctaggtccttccagttttgcaggagagggtctctggaatcaccttggttccccaaagcagaaaatctagaagagtccttgccaagacggcaaaatgtgtgaggggaaccagatgttgccctccctgttcagccctgaatgtgggtggctgtggcctttggaggctggggtcaccccccttcctcattgctcacatctgtccagtgaccaggtactcataatcttttattaagagactcatcagctctgcccttctttccctctctgtagccactgcccagggccaatggcactcatcacttcctccctcaatgtttgcaatggcacctcagctagtttgtgccttcagcttccctgtccttgaatatatgctactcattgacttgaagcttacccttctaagaccctgagctgaccagagagctctgacagcagtttgctgtgtctctattgcttcctaccttatgtcatagacagctctgttcacacatgccccctctttccttccagactgcaccctgtttgagggccgactcagcattttgtgtttgttctgagatgttcattcctttcattcctgcttgtttagttctcttatcattcaaggcccaacatcagagccatcactcctgggagatgttttctctttctgctaattgaagtcctcttcggggacttgttatattattaatgacaatactttttgtgcacacctactagctggtaagtcccttgaagtccagggccctatggtgccctattcttcctccctatcacctggcattgccctctgcacacagtgatcactcaggaacctttaatgagtgaatgaatgaagctagagtgtgatgatctccttatggctcctggattgtttcttgctagtgcctggtaaatgacttagttttctatgttgatgtttcattgagaacctactgcgcacacatcagtggttagtcctggaaagcagggtaagatccatgtgccaccacttcctgattccatgcccaaggcagacatcactggtggccacagtgttcactctcagtgaggcccaatatcgcctgtgaacttggctccacgtgtcattcctggcagctgctacccatcattagttagtatttgaagtgtaactgtcctgccatccctggttcagctatgatgagaggtcctgagaaagctgacattgtcctttcccaagggaatttacagttcactaaggagattaagtaaatattttaaaagtacttagtatgtggaagatttaagtagtcacacaaggcactaagtggttcagagctaagcgagtggtggtgggcggtagcaggcagtaataatctggggagcttggaaagtgaggaatgctgagccactgcagtcagagccgacttcctggaggaggtggctttaacacctagaggaattgggagaacagtctgtggcaggaggagaaacagcccaagcagctcctcagaggaggcaggccaaagagggaagagctttagattcttttcttatggtcagggcaacctctagcaatggaaagcccagatgtctcaaagacctggacggcactgccatggcattctccttgatttgcgagctggtgcatagtcctgaagagtcccttttaaaattcttcactctgaggaatcacttaaaacaaatcatgattcttgaaatctgcctctaacccccaaatagttttttttccacggtgaagaactggaatatttctgtgtgtttgctttgctctccatgggtaacctctcttcctgcatgataaatacacatttgaaaatattgatttgctgctacccctttgaaaagcttaagaaggctgacctctgcctcagcgttctctgacttgaatttttcagactgaccaattgacccctggaaaggctgagaaacgttacctgcggtcctggagggactttctgggggacggaggccacggtggtggcggccacttggcaaatgcctgaaaggagggccttttaataaaatgcagtatgtccatggctcaaatctaatgacttttaaatagctcctgggaagaggaaagcctccatggtggagcccaggagtcaccccgggggaagtgccattttccagactcatctcagaaaccctggggtcccctcagccccaagtacatggggctgtgttgggcctcaaagtttgcttcttctcaacctcccaccccgaccccgccgattgctcctcgttttattttctttccttggttttaccacggtatgacctcgtgttgtattttttctgaatgacaatgaaagtaattgaaaatattgattggcagtacagttaagttgtcaacacaaccatttaatttgtcaggaggacttgttaaattgtcaaaaatcatataaaaaaactccttcagtcactgatgatatacattagagatgttcatgaatcaaatgggccattttggagataagtgttgaagaaaaattctgaaatgggtttcttcagatacgtttgtgttctctcccactctctctctctctgatcacacattacaaagaatattggaacgattttggcaaggcaaggtgagtgagggatacttttttgagtagaggcctcactaagggtatcatggcagaaataagatcatttatagcaattaaattagaagattctaatgcggatgccatcaagttatttattaggacaaacgggttgggaagttcctttcctccttatatgtaggatttaaaatatgtgtcttggaatatttttttcttacggaaattctttttttcttttttgagacagagtcttactctgtcacccaggctggagtgcagtggtgctctcggctcactgcaacctccgcctcccgggttcaagcaattctcatgcctcagtctcccaagtagctgggattacaggtgcacaccaccatgcccagctaccttttgtatttttagtagagatggggtttcaccatgttggccaggctggtcttgaactccagatctcaggttatccgcctgcctcagtctcccaaagttctgggattataggtgtgaaccactgcacccagcaggaaattgtctttttaaaaattatttaattttttaagagacagggtctcgttctgttgttcaggcttgagtgcaggggtgtgatcatggctcactgcagccttgacctcctgggctcaagccattctcccacctcagcctcctgagtagctgggaccacaggcacacaccaccatgcccagctaatcggtttttaaaattttttatagagatagcggtctcactatatagcccaggctggtcttgaactcctggcctcaagcgatccttctgcctcagcctcccaaattgctggaatttacaggtgtgagccaccatgcctagcaggaaattgtcttttaggggctcttggctgctgactctgccagccctgtgtgaggctgagtgggtaataccagcttcctgttcagatatgtggggccctgttgaaaccctcctgcattttcactgctgctagtaatttagttcctgaagggtctatgtgcccaaatgaaattggaagtagctttatttattttagattaatttaagaatagtgctatctgctaccccttggtcaaaatgagtcaagtcattcttgacattgttagtttttagctctatttaataaaataatgtattagggctcagaaatccaacttgattcagcttgagggaataaaggattttattggaaagctactcaggtcactcctatagttcacaggagggctggtgtggtaggcagaatactaagaatggcccccgcagtattccttgtcccctagtgcccagcctctgtaatgtgatgagatatcactgccctgattctgttgtgttacatggagtggtggatcttaaaaagggggattatccaggtgggccgaatctaatcacacaggatctgaaagcgcagaactttcttcacctggttgaagcagagaaagtcctagatattcaaagagagagagggatttgacatgctcttgctggcgtgacaatggaggggctcacgagaaggatcgggcagctcctagaagcagaaagtggatcacagccagcagccagcaaggagtcagagacatcagctgtacagctgcaaggaactgaattctgcctgccacctgaatgagctcagaaggcgatcttttcccccagcgtatctggttgagagcacagacatgtggggactaacaccttgattttggccttgtgataccctgagcatagaacccagctgaggggtggagcagttgtgtgcagtcctaggattggggttatgcacctgaccaaggtctatcccgatgataggcagccccccaccgtaagctcatatgcagccccaaaagaagggaatgcagttctgggaagataatataataaatgcttgctaaaagtcatactgcatctcatgttgctaaaatgcatgtttttcacattttatgactctgaaatgggggtgcatctttccaaagcatggtgacttctgaaagaaagctgctggccagggtctgccatgtttgtctctgcctatgcttgggcagccttggcagctgttcctggtggctcctctcaactgtaacccctagggtttcagtcagcaaaccactgaacggccatttgaggaaagattctaagtctagttattgtctgaaaaccttctgttgacatttcctggtaagattgagaaagtgctagtatcaaaacttgcagaacgcttgttggcggctgcagcagctatgctcttgagtgacagagaagatgatattttgtgtgagaaacacaaacatcgataaactctgagttgaaaattgattctgaaaagtcaggcagtgagtgggagaagttttgggaatgctttattccatgtatttcacctatgtatatttttatgaatgcacacaagtgataaaagtctgtgtctacattaatccaaaagagctattttaataagtataaaataaaaatgccaagtgattggaaagcattgtgtggcagtttaattgctttgtttttctcagtgttacataaaatcatgctgtattaaaatcaacggcacattagattcatataattttaaataaaacattttagtatattacacattggttatcttgtaagatagggatattttacttggaaaagtggagactggggttttggcattgtgatgggctgcaaaaattggtgtcttttaaaattcagaattgctgaggtgtctgttgattagactgtaagagaaaggactgaatgcttgatgcaggttgaaattgtgccaatcatgtgtcccagcctccatgctccacaaacatttactgccactctctgccacctgagatgcctctgggctctcacctggaatctgtgattaaacatgagttggttgggaggtgaggcattgagaccatgagtggttggggtaggtgtccttggaatttataacatggctttgctttgtttctggcccaaggtggtattctgctgtcacagaaagaacacaccagaccacattttcatggcatctttaccattacctagctgtgagactttgatctcaatatttacctgctttggcagtctctatttctgcattaatgtaacaaaagagctaaactatagtgcctcaaattttgtttctagcactaatattttgttttcaaaaaatgtgctcagtgtctcccttgttgcatttctttgacttctcatttctggtatacatttgttcgtatttttggagttcctgtggcttgctgagccctatgctgagttatgcatgggagaaaagctgaagatggtatccttatcctcagggagctcttccatggcatttcagagagaggatagatatctgaaaatgggagtatgtctttatttttaatatagcatgaaaaaagaaagtttattagttatctattgcaatgtaatacattactacaaaacctagtagcttaaaccaatttatatttattatctcctaatttctatgggcaagggatttagtagcaacttagataagtggttctagctcagggtctctaaagaaattgtagtcaagatatattgtcaggactgcagtcacctgaaggcttgactggagctagaggatatgcttccaaaatggctgacttgcacaaatgtttgcaggaactctcacttccttttgaaaatgggagtatttcaaagaccatgtgagtaagtagatagcagaatgaactgtgtggattattaggaaatacagtcttctggagagggttttgttttgtttagcagagaacaagctggaggatgagggttaaatggtctgtgaacttaaataaatcagcagcgcttattgtgtttgtctattggggtctctgaattgcctctcatttgtcctcattctgggcattcaaatggggctggtgtcagctacaaaacacataaggacctgtaggcaccgttttttgctctgggcttaaacacctctgaaactcaaaatgggaattggatgtctgagccccctttattctaccaccatcactgtacaagtgtggtccctgccatagctagttcagggtcctctaatgcccgtagtctttctctgtcctgaggtcatcatggggcccaggctgcttctacctggttgctctgtcgttctttaactggtcattcttgtctttgtggccaaagctggcttaccagcacagcatttgtgctgtatttcatgggaagaagggaggcagcatgaagcacagccagcttcctttttaaggatatgacatcaacttgcacacagcacttcactgatattccattagcttgatcttagtcacatggcttcacccagctgcaagggtagctgggagatgtagtctctaactgggctaccgtggacttttccccatgaagaagtgtgcaaggaggcagttacttgtctgccacaactgctaccactgaaatctttgctttgtttgccttcttttacactaagcaatgagttccttgcaactagcatttatacttttttaatggtcacagtgtttataatagaacttagttcatggtagatacttaagaagtgtttgctaaatgagggaaacaatccatgaatgagcgaagaaatgcactgatgatggcacacactatttggggcccttctttcttgtatcctaagaaatagtctttgtatttgagtacatttagctgaaccgttagtgggctatgctgagttcaacctgtaagaggatgcttggcttcatctgccatgtggtctttgaacccaggactggggagatgaaggaatatttcattaatccttgcaccatttagtctccttatcaaatggcccaggcctattctttgttacagacaacaatgaagggtgcctttaagaaatctccagtgagtaccgaggcattgcagattaggtcagtagaactgctgctaggttgagcatgatggatgagcaggagaatgagtttctgctgcacggtattgtgaaatcttttcattgtcaccaacgggcctatgaggaactgatgaatgagggagcaagtgtcagaaacgcccttccttgccccagtacagttttaatatctccctgagctacaggatgagtattgataaaagtaaagtttaaaaatagccacggagtgatgggtagccatgatttaaggagaacagcaatggggttagagagggttcattttcttgaaagtgcatgagcgggagagagtgagaggaggagagaagcaggagagctggactgtgaggggaaagagcaggaggcttttataagaagctaatgtgatgaggatgacgagggctttgatggatgagttagctccatctggtcgcagtatatgtaataaatagctgtgctcgggtttgacctctcccttaccagacacatctttctctttggggatatccaggagggagcttccattagagtaaagaacccgtcatgagccagagctgaggatgtttatgggcttgtgcagagggcaaaaaggagatggtatccaagttacaggtttataaactgaaaactgtagcctgtgcgccttgctgacgatggtgctggtgacagaaatgcatttccagggttacactgctacttatgtgaggaggagaaggatgggaggaggagggtggctgaggggtggccagcagccccaagggctgcttcaggtacatcctggtttcttgcttattgcataaacagggcgcctttgtcacaccttccctttgctgtgagcaaatgttaaattaagctggaattgaataggtctgtaactaggtatataattcttaactgggatggtttgggaatgcggtattccggtcaattcaattttccggttaccttgttagaaacattataaaatgtgtttgctcatattcctgccttagaaaattcacaagagtgaattgatcattgcaggcatttgtgttggttttggcatatcattttacacatcagtgattgttgccttcccctgaagatataaaatgtgtcctggcctggagcatcccctaagagttcaggttgaaaaaaaacctgcccactttctctaataagtgtagagttttgatttttaataattttttggataattgatgttttatggatttctattcaagaaatgaaggaaaagggaatagaatttgctactgggttgtatagctgagagtaagtttggagagtgtattagtccgttttcacattgctgataaagacatacccgagactcggtaatttataaagaaaaagaggtttaatggactcacagttccacatggctggggaggcctcacaatcgtggcagaaggtggaaggctgaaggtgaaaggcacatcgtacatggtggcagatgagagaaatgagaaccaagtgaaaggggtttccccatatacaaccatcagatctcgtgagacttactaccgcgagaacagtatgggagaagctgccctcatgatttaattatctcccaccgggtctctcccacaacacatggtaattatggaagctacaattcaagatgagatttgggtggagacacagccaaaccatatcagagagcaaatggatccgccttaagagtaagtggcagatctgagaaatcagcttgtttgtttctttgggatcaaaaggctcttagagaaaacctagttagaaggtcctcccgccccatttccccagtcttcatggaggagctgcttggatgccaggaccaggtccctggtgcagcaagcctgctgcaacattgccaagtgtgggagagggaccgggttttgggcagcaccaccttggccttcctccttcttgtgtgagaagctagggatgaatgtgtgaaagcttggagcctagcataccacatgtataagtcagagccatcagtccctactgtggtgactcatccccttcaagaatcagatcaaagctgtggactcttcatactggaagcaaagcacacatatgcacatgtgcgcgcacgtgcatgcacacacacacacacacacatacttctgtatataataacttcaaggggggtttgctgccaccctttgaattccttacaatattgagaactcagctaagtagtttagaaggcctctacgatatatatgtgtttgtgtgtgtttatatacacatatgtgtatgcattactgtacctatatgcacacacctacatatatatcacatatatgtatatatttgcttatctatgtgaatgactaatatcatccaactggcatccaactggttgatgctcagtattcagtatcaaaggaatcccaagaccctgtgtgcttatgagcatttcatttgttacatgtgcaatttaaaaacatttggtgcttctgtctagtttgaatgttacttataagctgtggcagaaattctccttttgcaaaaaatataagtggattaaggctactcaagtgggaccatccagtagaattctaacacaggtttagtttgtctttgctacattctgtcatcttcttccttctttcctaccctctgctactctggttcctaaatgcccccctcctggccagtgccctctctccacatcgtgtccacatgttgcttcatcttctctttagaactccagtttctgtttcataatcttagctatgtgagtggctattagctggatattgggaggaaatcagagctctagagctaattcatactaaagtgtgaataactgattacttcaaattccccatggataggcatatttagaagaggatatgtcttaacccaaatcaatctcaatctactgaatttgatcattgcggcaaaggaagaattttaagcagcaatgtttaaaaacaacaacaaaaaacccacaaatggctgcaggaaagaaaagagcttaggagacaaaggatgataaatgtgagtattgttcttcatgagagaatcacttggaaaggtttgaaggcagaaaccaacctcaggcactagggacagaaaagggagaaaactttatatgcagaatttcaccatccttctaactggaggtttccatgattgggaagaaattgattttaatcctttaatccttttttgttgattttttaaatttttatttatttattttagagatagagtctcactctgttgcccaggctggagtacagtggcatgatctcggctcactgcaacctctgtctccagggttcaagtgattcttctgcctcagcctcctgagtagctggaacttcaggcatgtgccaccacgcctggctaattttttttgtatttttagtagagactgggtttcaccgtgttagccaggatggtgtggatctcctgacctcgtgatccacctgcctcagcctcccgaagtgctgggataacaggtgtgagccaccacacccggcctggttttaatccaattttaagagataaacctagtctctaacctgaaaaggcccatctttctatcctagggacagatttgtcaaatctttgatagattttaggtgtttctgttgtgtaagaggatacctgatgggaaggaatactggagctcatatgaacaaagaaaagttgtaaatctctggaactctctctcccatatcttttctcttatgaaaataataaatgcttttccaagagaaagcagagagaagaaaaatatttctaatactcttgccagcctgcaaattaaaacactcttaatattttgatgtatttccttccagtattctactttttacatatagggtattttatatgctgcctcttgattttatagcacctgcattttccatataattacatattcctaatgaaaagtactttaatgactacctaatattctcgtagcaaggtgttgttttgttttactattattcaattcacaggtacatgtgttcccccacgggggttttggtttctttagtctaaagctctagaagtagaaataccaggttagagtatgaacatgtttgttgaagggtctctgagacctattgccacatcactttggcaagaggttattgcagtttactctgctattggagtgaagcctgaagcatcgactttgaaagacatcagagctcctacttctcagtcgaggggtatagtaagtcatccttgaaagtggaaaagagaaaaagatggggaaacggggactggggctgcttcataacagcccatcaggtgagtgctgactttaacactaatgctttcctctaaagttgcattaatttgctgggaaaccataacaaagtactgcacgttggatagcttgaacaacagaaatttactatcttacagttcaggaggctagaagcccgaattcaagatgtcagtcgggttacttccttctaggctgtgaaggagagtctgttccaggtctctctcctggcttctggtggtggctggcaatctttggcattccttggcttggagaatcatcaccctgatctctgcctccatcttcacctggcatctccccgtgtgcatgtctgtatccaaatctccccttggtgtaaggacatcagtcatattggattagaggcctgccctactccattatcatttcatcgtattacatctgcaatggccctaatttcaaataaggttacattctgaggtaccaggggttaggacttcaatacatgaatttcagggagacatgattccactcataacaaaagagacccactaggcactagggagtgagctactgcagagtggccccacaagcaagtcacttgtttctctgggcctggctttctgcctctcaaaaatgagggtgttggactagagcagtggcttgcaaagtggggtccccagcccagcagcatcagcatcacctgggaatgtgttagaaatgcacattctcaggccttaacttagcattactggatcacaaactctttggtgggggctcagcagttttgtgttttatcaagccctccaggtggttctggtgctgactgaagtttgagacctactggaccagatgaccctctgggtaagaattctgaaatgtcaacatctgaaacatgtgtgcacaggagttcactgccccatgcacatggcctgccatgagggatgcaagcctagtaaatgatcgcagccaattttttaaacgtaaatgataatctagtttttgtcctaggtgagtggctatgtgacaaactccaaagtttttacaagtccctactgttctttcagtgtgcaacctgtacctccagaaaaatacattcactcaaagtaatgtttattgatcaatgaactgtaccagaccctggacgctattccttttgcataagtgtgacttgtttttgctaagctttaacttgtcccctgtttatttctctttcctaaggcataagtcaaggccagcgagatggcttggcccacggacctagatttagaaacatcctgttattgatgtatggattatacatgaaggcctaatggagactgctgtggggttcagggaagaccaattagggaattaattcattagagcccagcatacatgttgctatatctatttacttatttaggttaatgtcttttgctgatcttcttacagccataagtccctgtcaatagttgataatgtacttgaatttccttcagactattaaaattttacatattggacatttatgacaggaaccaaagtttactttttgctttgacatcctgatatctagggtcttctgtatagtaataaagtaatccaagaatctgagccacacactggccaatcagttttctctgcatctgagatcaccaaatacacttcttttctagccattttacctgtatgaatgtgttggtaaccttgttataggacaaagctgtacatagaatattgcttatctcattcccgtatcatcaactgcaggataacatctgctttgtttctttccttcgttccctggtaagacaccttatttgcctctcattcttcatgattgtgttttgtcccttaatttttgatacaataaccaggggtccttgttgtcatgatgcccatgcagtctatgcaaaagaaagattattttagtgggaagatcatagatgtgggtggcagggagcttgggttccaacctccacttgttgactaacttggtgaatctgggaaggttacatcttcctctcttctttcaatctgagttgtgaggtggaatgagacctgttgtacctgcttttgagtgagggcaaaagagatgcaaaaatgaaattgtggagatggcagtgctttgaacaatacaaagtggtgcactgatgccaggaattctatgcatatccacacacatttgaaatttttgtccagttcagattaaagacaactttattattaccattaaatctgcttacagagcaaatatgcaaatatgtgtgtgcttaatggtggcaggcttgctttaatccttcttgctttggggttctgcattttattttctggtgatgcagacctggtaatgatcactactgatatttaccacattttattaatgtgatttttatgatcctgcaggagataattaggattgggtttgtttttttcacgttcatattatgaaatttcgagctacatagtgacatggtggggaggagggaaatagcacagagaaggaatgcgttacaaataaactcaacccagaaaccatgtttaacatggattaaaatgaatgtagccctgtgttcattatttatagctattatgcagaaaatatgttactggactctcaagaattggatgttaagaaatgtttggttcctccctttggaaagcatccaattaacacaccatccagaggagacagattggggggtcaaggtagacaggaaacattttctttgatttacttattttaaaacctttatttaatttctaccatttaataaaatcagacattagatgaattgaactaataaactgtctttatatcaatatgagagtgaatttgaggccaggctctgttggcatagccttatgttttgtttccttttaaaatctgttcttagactagtaggtttaagcaaagttttatacataagatgatcaaactggtggaattaggaggacagttctatgaccataaagcagatctctgcagaaggcgttacccccgtacatgcacagagaaggttctcagtaaactctcatgtatagaggctagataggatcttggttaagagtgcctgatccggagccagaagacatgcgtttgaagcctagtggttttgtttgtttgtttgtttttgttgttgttgttttgagatggggtctcactctgtcacccaggccggaatgcagtggtacaatctcggctcactgcaacctccaactctcaggttcaaacaattctacctcagcctcccaagtagctgggattacaggtgtgtgccaccacacctggctaatttttgtattttttggtggagatggggtttcgccatgttggcgaggctggtcttgaactcctgatctcaagtgatccactcaactcggcctcccaaagtgctgggattacaggtgtgagccactacacccagcctgaagcctagttttaacatgaactatttggcacccttaagcaagttactttagcctctttaagcctcagtttcctcatctgtaaaatggagaaaacaatagcacctaactctaagggctatagaaagaagtgaggcactgcagcatctgaagtatttggcacctggtacctaacaagctgtcaaatattaattattgttgcttatattactatactgttacaataattattagtaatcttactgagtaacaaacattacctgttgcataaactaggtaggggcagtgtggcagggaataagacaagtaaagagtttggattcataaccatttgaaatcaattctaaattatgagaatgtatctttagaaatatattttatgtttatggagcatgactagtttagaactgacatttaggacttctaaactttgtaaatgaggtatgcttagatgaatggcatcccaattccatgagtgggctctttacttctccgcactccactagtgaatttgaaggccactgtgaaaagaaaaaaaaaccaaaactctacttgttgggctctgtggtgctgttatggcttggcccggctcagtttcctttctcttcttttctggacaatttcaggaccatggcatcttgacttctctaaaaatatttatttagtaagtctttaggtaacttcaaactctagtcttgggcttagtgaaacagaaatccagaatcctagatttctccaaagtgagggtttgtggctgttgtacctgagctatggtgcccaatcatctgtcatccctggctccttgacactgggtttatacacattatagggaggcaatggagtgaagctcagtgaagcccaaacatcagccattcatgtagcaaccttttctgcttttgctgtattgcttcataccacctgtacccttatctccttaatatcttctgcaattctaatctagcatatcattgcttattaccttgtcttggcctaagaaataagatctggaaaatcccagggtgcaatgctagtttcatgtcttcctatcatccactaaagtagctacataattgtgaaaatttaaatgtttatctgtgtatcagcaaaagagcccttgtgtcccactgatgggatatatatattccatgttttgggagatgtgggtggacgagagcctgggtgtgaatcccagcatttctgctctctcccgctcactagctttgtgaccttaggcaggtttcttcatgactctgaatgtagtttcttcatctgtaaaatgagggtgaaaatacctcctactttatggtgtgattttgaggattcaacgaacccatacgcggaaagcacctagcaccgtgcttaggaaatggtcatttctgggtggtgggaacagcatgcagcaagtctgctccttggtcctctatcttgctgtcctacccagtacattgttcattccatgaaggcaggggtccttgttattcatcatttgggtaactacacagtgtctggaacctagaaggccctccaaaagttagctaacaaatgagtgaatccattaaattacagttgtcccttggtcacctggcatgggcaacagtgctttaggagcagtggacaaatacttgtggggctgaggggaatgtaggaaagagcagatccttagaagttagagattcttgagttcaaatcatggctctgctatttattggttttgtgaccttgggcaaattaccctgcctttcaggctatgcttaccttgtttatataatggagataatgccctgcgaggctattatgagatcaaacaagatagggaaggtacctccttagcacctggcacccagtagatatacacccaactaatagtatcccttagcatttgcaccccataggaggcaaggctgttgccttcacacagtgtgtgacaaagccagtgagttgttcagatcaggcatatggtagggactttgtaggaggctgagctccctttagactggggtagtcagtacaagtttccttgaggtgttggggtttgccctcgacttgcaggaggagtttcaggttttgtgcggtagagctgagctctccaatccctcgtccctcctttgtggcacttctagattttccagcctcaggcattttcaggtatgtctaattcacttggtctattgctgaactcccaattaaattactgtattctttaattacatagcatcttaaactgtagctttgaatttaattgaactttttcatgctccttgctccctagccaaacaatttgtacaaaaaaaaattgaattaacaatctgacttttttttgcattgattattataacattaagagagtcccaggagtttccaggctgtaaaaacctaaattgtataacattactcacaataacgcatatgttataatcgcaaagaacttacttaaaattcaatccactttggcatcattatcatgtatcaacataataaatgagtccttcagagcatggtaattataatttgataaatcatcagcagaaaattaactggatgtcaaaacattcattggagagggtgatgaatcggggatgattgtggtgatgaattgtgttaatctgcacagtatgaagccagcgaaatggctaagcagcccaagatggatggggcacagaaccggcaaggtcaggacacagagctgggagaggagggaggcggcgggcaggggtgggggaggagctgaggaggggaagaagaaaggaccagcagcttccctgggaggcccacgagttaaccctttccccacatcagtggagacagggccccgtgaagagcctgttcttgagggaggtcaggaggaacctgtaatgtgtcccgttccatttaagacccccttccactccctactactgcctcctgctaactctgtgggtattccttagattaaaggcgaagtgctgagtgaatgatgagaagcctagtaggcctgacagttttgcattaacctaaaaattttctgatggtggtgagggagggggcttgttggctctgcagtgggagtgctcgcagcatctctccacctggtctgtggtcttggtggacagggtcaagcaggctcaaaaggataggcctgtgaatcatgttagtggggagctcttgtgagccccactagagctgtaaggacagagggacccttccggaggagtggctgctcatagaagttgtggggctgatctgtgccccagcagcatggaaaagggaggcatttctcttcctctcaaaaatccacacaagcagctacagttccttggccgggagaccagcccatctttcaccaaggaagttttgcaagggctgtaccatggcaggcttctctctaaagcttcagtcatgagaggaggttctactaagctcttaagttccagagtgatagagggaaggctgcacattctagaatgttccctgtggccttgcatgctcaagtgcctctgtagcattaggggcttgccggatactttctaaaaaacagcattgccagagaatgtgggcaaaatacttatccaattaaactaggagccaccataatgtgcagggataagtcagcttaagggctaaaatctggggaaataagggccaaattgatgaagtggctatcattaaaaactgttgtttttcctctcattcctgtcccactagagattcatacccttaggtatcttttggagggtgaattagagcatggaatatgaaaaaagtgcagcaagtgagtggaaaaattgtttgaacatgaaaacaaacctagaaccttgagggtactatagctgtttatgtggctattgagtttggtaaatttgtaattaggtgagtatgggttttgtttctgttttatactgattgcttttagccctcagcccctcattaaaaataaccattaaacaattaaaaaaaacccttcaacttgggtaatataataaagcccaggcctttaaagaccaatggctttcctaagccacactgacagccactgttggctgttgcaagaaaggacttgtactctctggcttttctctttgcctcttgggtgaatctggtgcttccctagatggttgtctatgttgccttaatatctttaggggaaaatcccacaaagacacttggaggtttgtcctgtggtcatctggctctcagctgcttcttttctttgagtctaaagtctgttttccttgcttgttgctcgattgagcaactacttatgttgtcggtccagtaataataaccttaccaataatgagaatccctttgacatgtatttggcattactgttctcaaagaattttcacatgtgtttaatcatgttaacagccatttttgggttctctttcctcctaagcaaggagacagtttcagtcaaaaattctcccccactggcatgtacacctgatgtgatgggcatactgaggttcagcacagtggagctgagctggtaaagcttctggcttacatcaatttatgttcacaagctcacgcttattatgataattttgccatgtttccttttttcttcttggtacctttcatcagttttgacacctttagaagcatcagcccaatgctttaattttctctttctgaaagaaggatgatgcctttagtagcatcttaaactatgtgtcaaataggcttccctggactttttttaggaaactcaccaccatcagtgacattatttcttgaggaaattgagctctgagtcctcagacccaatatttaaatataatgtcttccaaaagttagcttgtacattgggatggtgatggactggggtgaaactttgctccaatgctgatatcatagacagtatttgggatatctactgtgtttatcaagggctctgtacaaatggaattgtctgagatagacctcaaagattgtgcatgctaccatgagattcaggttgaaagataaaatcaaccttgatcatgtggctggtttgacctttgccacttgatgaccccaagacacatctactttttttgaggtgtccaataggtagctctctggatacttgtatccacttctctctaatcaaacactgatcttccccctagtttcacctttaggggtagtgtgatttgtggaaaaggagtgggctggagactattagattgagctctggcctgaccaacagctagctttggggccttgggcccatctcttctcctgtgtgggccttagtctcctcacccataaaagaaagagatgaaacattcatgggatttcagacctttccatggtgccaccacacaggtgagctgtgatggggactctgagccctttacctccccttaagccccagcacttctacctttatctacttgtatctgcattctgcaaaggatttcatttgggggaaaagttctgctgctcaaacattcttgaaagccaccttcattttctctcccatctagttggtactttaattgcttgggtcccactgtgcatcatggtgctttctagcttgtgcattttatgaggccagcttatgggattgtattctagttgcccaaccctccttctctctcaggtacccctggggaccaaaagttaggagaaagctgggaaacttgttgaagagcttaggaagggttgaagatgggcaggcccagtgtgggcttggaagaggatgggcacagaggaccacatcctttttactgtgtcttcttattcctatccatcctaatctcagctccgtgtgagctgacttgcacaagaagctcttgagtcctaacttccataacatctaaagaagtagtggtaccttctatttgttcagtgtttaaaaatcttgaaaatactttcacagccattgttatattgggtattctaaataacctgagaaggtagaaagggcagtagttgttgccctgggtctagagctggggatgtgaaggcctggaggaggtgaccaatgagccctcctcagtgacagtaaatgtgaaaaccaggacccaggcttttcaatcctggtccaatactattccctttgctcttccatagtgagtggtttctcagcacccctgagtcagtactgccatgtagagatattggtgaaaaggagaagaaattcacattggtctgttttctccttcctttggacatttccttcttccctttctctccccatcaagaaaaatgtcttttgttcttggggtagctatagacagcctccccgtctgctgttttcccttctctcctctcgcagcaggaaaacagggtgattatggggccttctcttagcggaggtgttaagggtttatgtagtgcttgtcaatgaatggctaatggactcagttgggttgtttcaatgacagtttcccacaatctgatactaaagtggaagccttgagtgaagcttttatcactctttcaccaggctcatcaagaacttccttttcctctctggaaattgtatttcatgtggtatatttctaatccaagtgttacatcaatcagcaattcagtgtaggcttgtggttctcctggagcattttacaagcaaggatggggtttcttattctggccctcttggactcttggaaaaacactccaactgcaatttccttccatctattatgatctgtttttttagttgctattagaattattgggtatttcaagacattatcttaataaaggcattcctttctgggctgtgcttgacctgtgggtgagattgggaatctgtttcttctcatggttatagtgaagttagggttctcagaaaacccaacaaaatgggagcctttgaaacatgatctttttggccaacgacttctgtgtggttaaagggttgctggatgtcgtcagcctgtggatttccatctggagagtggtttgtttttaagaaaaccctccaaatgatcagtctttcatatttcagatgtcaaagaaagaaacaagacatttaaaataactaacactagaggaaatattggctggcaagaaagggggagtgagatctggctcttggatgtatcgcttcagctgttttctgaatgtttgacaaacacatggcttcgatgtgctagaatcatagcagcccagggatgatgactaatatggcattagttggttataagtccacttaagaattagcatctgaattcatgagctggtttcagtgaaaggaaagaaggagactttggagtctggattttggagtttgggattttttttttttaatgaatattttttaaagagcgagaaaacctctccttaaccccagggaagactatctagctgacattttcctctatggtgtcccaaggaaaaaacttgtccccaaatcctatcctattcatataaaagactgagattaaaatttgggttattttccccttctcattttaaaaattcatctgaagcgtttttgaaaaacaatacaaaaaacctctctctgcaactgtgacaggatatagcagctgtctgagaattttctctttttttttactgttatcttttctctctttaagaaaagagtcgtttcagaggcagccgtgacagctctgtcatttcactcacacctctaaatttctctttctgttgtcagtcagcagacagcaatctctggattctgatgggcctgagggatgtccaaatacatgagagatcggagagaggcctgcagcagtgtgcgtcagaagccgtcatcttctgcctttattcttagaggaattgtcaggagtttataaagttctcctgtgctgggatctccaagtctcctctgccaccatctacagcccacacaaataggcatgtgaggggctggggctggggctggggcttcctggaatgtcacttctgcaagttccagttaagaggttgtgttgagttcctctaccctgtgtgctacactggggaaattaagactatattgggagtaagtcctttcaggacaaaaccactttaacaacagcagcagcagcagcagcagcagcagcagcagcagcagcagcagcagcagctactcctgtttacgtgttcttatgttctaggcactgtgccaagtgtttcacatccactctccactcattttccagtagtcttgcagtaggtactatttttcatcccattttagtgatgaggcatctgaggctcagattcattaaataactcaagtaacttgcctaaggccatgcagcaagtaagtgacagagctgggattcaaactcaggactatgtgacactgttgcctcaaggccttaagccatgtgcagttctcatatgccatcattgtctttttttccactgtgtaaggagacacagaaatcataatgacctgctggacaggtgaggcctgtgcccttgtccttttttttttttttttgggacggagttttgctcttgtggctcaagctggagtgcaatggcatgatctccactcactgcaacctccacctcctgggttcaagcgattctcctgcctcagcctcccaagtagctgggattacaggcacctgccaccacgcctggctaattttttgtatttttaatagaaacagggtttcaccatgttagccaggctggtctcgaattcctgacctcaggtgatccacccgccttggcctcccaaagtgctgggattacaggtgtgagccatcatgcctggcggccctcatcctttatgcagtattatggcagctgaattaagatgaataatgacagcaccgtgacttgggggcggtggggtagtgggggtcagaagtaccccaggaggtggaggagaaaggccacctgaactcaaagggaaaagttctatagttgaaagcaacctggatttagagtgaatctctacaaaaggggccccaaaatgcctgaccatgtgagcttgatataggtcttttgtggagccaaacttacctattggtctgagctctcctgtcagggcttggcacatagtttgaacaaccccagtagtcgtcttatagatgttggcaaaactacaaacaacacatttttcacttttaaaggggccagttttgcatcttctatctgtggtattccattgtccccagttttcttcttctttcttctgttaatttcccctgcagatatagcatctctgccatccacaaatgtgtcttggttccacctaactgttccctggggcaacatggaggggaggcaaacacaccttgctgagcctgactttgaccatgactcatggtgttcaggcccaaagcattcaggggatgagctacacagcaaagtgggatgctcaacattgctacctccaaaatatcattgttagtcatttcctttctggagttagactgcttgagtgcaaatcctgattctacctcttagtaaacctgtggccatttgggtggttattgaacttctctgtacctttgtttctttgtctgtaaaatgaggatagcagcacctaactcatagggttgctgttattgataatcatgattattgcttttatagccttacactaagggccaggcctattctaagagtttcacattcatgaactcattcaatcctcccagcagctcaatgaggtaagtattgctttttcctcattttgccaatgaggaaactgagttgtagaaaggttaagttatttgccaaaagtcagacaggtagtgagcaatggaacagagattcaaaaggaaggattctatgctcctaactgccatcctgtcccctaaaatttcatacctacaacatgcttggcataatacctggcacatagtgagagtttactaaatatataccatagataataattgcagtattattaacatgatgaggattaatgcaaggcactgtattagctgctgataataatgatgcacaatccccaaaaagttcacttgtgtatttaaaaaccaatgaggaagatggatgctttaatgagcgatgaccaccaagtatgtacaagctatgacagatgatctacagatgctatggaaggaccagcatttctttaaataaaaactactggtaactttcatcttaggtcaggcattgtactaagtcctttgggacggagttattttactgaatcctgcatggtagatgctgtaccataattatcccattctgtagacactgaggactggagaagtaacttgtctaggtcacgcagctctagggggctgaaggccctgggctctaagccactgtcctactgcccaacttgcctgagtgcctctacactgatggttgtttcccaggacttcctgatttttttctgaaggatggaaacaaagacgacccaataggagtgaggtcattacctccctcccattctcccttcagcaccagatctccaggagatggttcagtaaaacagcagtgaattggatagaggaatcgtctctgtggagtgactttccttgtttctttggggtggaccattctgggctttcctcctttacacatgtgctcatgtgacactctttgtggagtgccagggactgtgtccttcgaggacagattgggtaccctgttttctgtggccttccatgaaaactgcccatggcatgctctcctttctttgggccttgaactctgaacgatgcacagaggcacttctgtcacatcttcctttgattctatgttgtgtgtattaggctgctgtgactatctctaaagttcttttagaatagaaatcatgtctgctcaatattctacagcatctgtctcaggctgatgagcatcccaggcctctccaaaatcagagtcattttttctttctttctttccttcaccaccgtttccaattcatcacagagtcctgtcagctctaattctaaaatgtttcctgaatctcttccaccaccaccctgggccaagccaccattacatatttctgggacaacagtagtagcttccaaactgctctcttccttttcttcttttcttcctacaatctatttgccacatggcagccagagtgggcgttcaaattgtcaatcagctcctgtcactctcttgctgaattccctccagcagttacctgttgcacttggtgtaaaatccaaagtccttccatggcctacaaggcctggtctggtctggtcctatcaacgtctcccacttcatccctgcagaactctctctactctgtacatgccaggccccttggccttgtgtggtcactcaaaaagaacaaacctattcattcgttcattcatcttagaatctttaacaagctattccttttgtatacaacattcttggttaagttggtcccttcttatcttttaggtctcaactcaaatattgccttctcgaacactcatataacccacttataactggcagtctctctctattctgttgcttttttgttttcttcagatcacgtattattatcttcacaagtgctgtttattcatttgcctaaatgtgtattgtctgtctacccccagtagagtataaactccatgagccagggccttcacctaccttgttctttcaatcctatgccccctgcacctggcagaggggctgaaccataatgccagctaataactaataagcagttaatatttgtcaaagtattactatttgccaggcattgtcccaagcccttcacatatattaagccatttagtgtttacaatgaccacaggatgtggatattattattattcccattttactgatgaggaaactgaggtatggagggtttatgaatgcagtagctcaagggcatacagctagtaagtggcagagtctggattcaaggctccagagcatgtgttcctaatcgccacattacaatgcctctctagtagatactgaataaacccttgttgggtgaattaatgaatagaagatgctcagtagagctttgttgggtaaacacaatcatggattattgtggaaatgtcttaggcctgaacattgtcaacctccaagagcagagggcatggcactgtctacgtgggtatgaaatgccccataaccgtaaatggggtctgctcacaccacatttgctatttatactttatactagatagagccctctagctcgatggttcttttcttcccttttttttttttttccttttttaaagagaagagaattgtgggaaatattttgttttccctgggagccagactatgtatttacttcaagttttattaaatgagttataaattttcccagcaatttactcatagctcaagaggtttaatttgcatgtgttgccttttacaatatgcttttcgtaatgttgcagatgcttcttccccagcttcagtaaacaacaggcactccgccaggtttttgactgaacatgtgccaggcctgggaaatatgagttaactccatggtgactgttgggggccacacgtccccctctgtccagggcatctggggagctgagtcgaattcctgaggggcaggagcaaagattttctgaatcttctttttggacatctttttaatatttttttccacacgcaaaataaataaataaacagacatttctgcctaagtatcaggtttgcactggtcctaattagaaagtagtgttaataggatgacagaaagcatttgctagggcccccagggtgatctctagagaggctaaagtcactttagcctttggggagctgcccacggcctatgatggtgaagccctttgagcttcgaagaagccagtccctctgagggtccaggtctgatgcctgtttcatttcaggtagagagcctcagggttgagaactcatcttctggtgtcacactgtcgggttgagttctggctctgccacttattagtcgtgtgaccttggacaaggtacttaacctctctgtgcctcagtttccgcatctgtggagataatggtcataatggtccctgtcttgtaagtttgttgggggaattaaatggaatactgcatataaagcgtttggaggagagtggtttataaatggacacataaatggcatgctgattgtcccagggctattcagttcattggctacaacttaggggacagatcctctcagtgagttattcctggttggagatggagggcactggagcaagggatggatggtgtgttcattagaatgaggcttagctgcatgtagcagaagagctcaagttaacagtgacttagcattgtagagatttatttctctcacataaaaggagtatggaagtattgcagggctggtgtgataatttcatggtgtcatgaggaaccctggttccctctctttgtagctctgacattcttagcatattttctcatgattcaagatggcagcttgtgctcttgtcattctgtgcgcattcctccctcaagaagcagggaggaggaaggaacaaacaggagtctcattacctcttaaggaaacttccagcaagtcccacgtaagacattctttgacatctcattggccagagtttagtcacagagccacagctagctgaaaggaaaatggaatcgtttagcttggcagccacatgccaaataaaaatccaggttctgttacaaagcaggaggtggagaatgggtgtggacgcagtgaactatcagtgagtttccagtattgtcctgtggttttgtgacttgaggttgaaggaattcccaggtacataaagcagtattaaattttgtttcctagatgattttaggtggcacaaatacattttttatttgaataatcttataattttttgtatgcaaccatattataattacatatcaaacccaggatttcacagatctcctacagtgtgatacaatgttataatgtttttctttaagtctaaatttaactgcatcaatgtttaaaaaattaagtaaatgccggcatatagagatgagccaggcaatctgtgcagtggctaaatgtgggtcctggggcctgagtttgaatctgtaacctgccacttattggccaaatgaccttggactttccatgcatcactttgcttatctgtaaaatggcattaataatagtacccatctcacagagttgtgataaggaccaaatgggttagtacttataaagctctaagaatagtgccaggcatgtgatgagtagcccgtgaacattagtcattgttcttattgttattatttctgttgttattgttattattatggcttatattactgctattattaataataatgattacaatagatgacatttgaatagagcagaaattacaagggtggtacatgcgtgactgaaattagggaaacactggcttagaggagtgagattggcagttaatcaggagagtcttagacacagctataaataatgactttattaacaattaaaactagtgctttatgtttaaagtggctccatatatgataataacattgattagagtttattgaacatggtgccaggtaccatggggtatgctttaaatatattacttttaatttttccagtgctgtaagctaagtgttctttttattctatagatggagaaacttagtctaggatagggttaagtaattttcccaacatcccgtggggaccagcatcaaggtccctgctgataaacgcatcttgtttatgtcctttttggtgccctttcttcccttttccccttctctgtttggatgtcaaggaccccttcattccactcaggaccctctgatttcccctcctccccatgtttcttcccacaccccaattaccagctagtccatatgtgccagctgtttcccaggtcccttcccactctcagaactgccctgtccatcatctgtgttcctgcaggacacaacaggcaaaagctagtctaatgaactaatctatgaaaatggacattaatagactaatatgtagccctctctgggtcatttattttagaatgggcttgttgacaaggttttgtttttttcttctgaataatttacttttctctctctttcttcttttaatagactttattttttagagtacttatagttcacagcaaaaattgaacagaaggtacagcaacttcccagatacccactgtcctcacactggcatgtcctctctcactctcaacatggacttgaggtcttcactcaaagggataattcgtgatggagattaaaggcagcaaacagttcagtagccttgtgggtctgtcctagaatgtctcctaggttattctttaaggttttttaattgctgtatcataggatcctgacaaaaatgggacactgagatgatgaccaaagggatcaagcacactggtgagtgatcagtcaagggccctgctcccccttctccagcacccagccctgtgtctggcagatggagagcacgcagtcaatactgttgaatacatgaatcgcctaccaggggcccttcggatatgcagggaatggaaggtcctttaaggaatgggacagtgacttacagtgggtaaggtttggttgggcctcgtgaacttgatagatttttttggcaggggggctataatgttctgtcatgcaggtcagcttgctgtcatcctggacccgtgcgtgtctggctaagtgtgaactgaacatgagcagcatgatgcagggattaggggacattcatcttccactctttctctttggagctggaggctcaatgtgttactctcatgatgtcacaaagcaactgatgtcttactacatcctgaaagaattatttcctcttttactcttcttacaaattgtacctcatgatccattgaatttcactttcctatttttccaacatttctcattttctgccctttttatcctctctctcagaccattgggggaaggaagaaatgttgcttagcaaccagaatgaaactagtcaatactgcttctaatattaaccctttggtaacgtgtgtgcgtcccaatccatgtgttatagaactctcccctagcatgttttaaactagaacttcatctaaagttggcagctcaactttatgtcaaatcacaaacatcaaggatatatttgtgggttgttataaatgttagcaagttccagtgttataagttatacacattgtctgcttattaaagtggttcacttttacattcttaacttttgaaatttgctgtgactatttcacatgttactttcactttttgaacaaaatagtttctttgctggcttggtgtgtgtctgtgtgtctgctggtttgctttttagacatttaagtccatttgtctgacaattggaagatatgttttctgggttgtatcattcattcatctaatgtttattgggctctactctctgccaggtgccatgcagggcaccgtggagtattgctgacttgggcaaacactgcagaggttgagcagacttggtttctgtatgcatcttttcatcagcaaagactctttttcccttttcatcttcatctattgaaataacatataacagggtgggttttcagatgcaatagttactcttctactggaatggtttctttggctttgattggacaatattatccatacattttaagctctttgagagtgagtgggccgggcacggtggctcatgcctgtaatcccagcactttgggaggctgaggcgggcagatcacgaggtcaagagatcgagaccatcctggccaacttggtgaaaccccagctctactaaaaatacgaacattagctgggaatggtggtgggcatctgtaatcccaggtactgaggaggctgaggcaggagaatcactcgaacgtgggaagtggaggttgcagtgagccgagaccacaccactgcactccggcctggcgacagagcaagactccatctcaaaaaaaaaaaaaaaaaagtgagtgagtgataggatggaacaaaaagataaatattggccagctcctctttcatacaccaggtacagctggtgcacacacacagttaaagtttgggagtgttgatttgcccgacataaaatcatgttggtgaagttggcctccagtgtttctcttcttacatatgtgcccccctttttgctacaggtgacctgtcaaatctcccctgatatccagcactctcatgccagtgaatgccaccctcaactgggggaaacagtgaactgatctcttcttttccttagggcattttttactttattgaagactctctacaaacacagtgcctttgggggtgaaccagaatttactgtggtactctacacagacagtaggctgagtgaaagctgaactgattggggttttcagattgcctctgtcttctctcacttggaaaggggcgattcccccttacattccctctcacttctggggtgcctagtgggtgatatggttgaccatccttggaccccgcattgccttgcagggtaatgccagttgggttactcacattctctgggtccccagagttcccatacacgagaccattgtggagttgtgggggttgtgtggattccccctgttagcttgagtggccagtattccacaatgcttgggcttggtctctgtgaattggttgggtggcaaaaagtatctacaatgactagattctgtaaagcaagctaaaggtgaagctggccttaatgattttagcttatttgttatctaaaagatagtggtgacctaggactcatcaaggtgtggctttgaactggagtttggtagatgtcttcaaaaaggcatccaaaacacctgagattattattacatggtacttgggttcttgccttactttattcagaacagaaaaggagagagaacttagagacacaggaccgggcatgagcttaattctagcagcttctattgttgagcacccactatgtggcaggcattgttctagacaggtctattgcatacgttatcttccagcctttccagcagcctcgcaaggagcacattcatatccctgttttgtgggtgaaaaaactgggattcaagagagggtaaatatcttgctcaaggtcacatagcccacatggaccaggcagggatgtaaatgtagatagggtctgactctgcatcctgtgcattctctgcaggaccacattgcctcctttgcaagtcaacctccacttgaaggcaggggggagctcgggttgtagtaaacaatcctagatgtgagtaatgtgggcatccagccatcgaagcctgccaggacagtttttaccatgtgaaagcacttagttgttcagtaggtcccattgatcagctaaaaccatagcaggaacaaggaaagggctacaggagccaaataaaaatttcacattcactaacttggaaagtctttcttcatttctcatttactgcattgctgtatatctttccatctcttctctcgaaacatgatcccagtttactttgaagtggctgagtgtggcgggggttctgtgagggagaggtgattctgacgatgatgatggtcttacctgtcattgaatccttcacatatatgtgtgtatatatgtatacacatgcatacgtaatatccccaagtcattttcatttttccttcattagctctcacttacaagttatacattttcaaatataatatgcgtctatgtatgtgaataggtatgtgtatatgtgtgcatatacatacgcgtacatgtacgtctccaatgcttttcttttctttttgatacagagtcttgctctgtcgcccaggctggagtgcagtggcacaatcttggctaactgcaacctctgcctccccagttctagcgattctcatgtctcagcctcctcagtaggtgggattacaggcatccaccaccatgcctggttaatttttgtatttttagtagagatggggtttcacgatgttggtcaggttggtctcaaactcctgacctcaagtggtccacctgccttggcctcccaaagtgctgggattacaggtgtgagttaccacgcccggcccccagtgtgtttttatttgtcctgagtttcctttcctcctcacaatgctgctccccatgcagggagccggccaggcagctctagggcagggggagtgaacagggaaggaactagccgtgcaccacaaggtcgtgtgagaatgtcagtgtctgggcatatcacatggcaagtctttccttcaacgacatcatgatttacctgggttcttgctgagctaatctccctgcagcaagaggacactaagtactggccgtatggctggagaaagctgccctgggtcctgcaaggccaggctgcctggaattcttggggatctgtgccctgcggggaggatatccaaaccagcaggtggaggaggagaaagagacaagagctcaggcctacgcagagcttccctgctggggcctggtctgctgagtgggaaggaacagtcaaggccatggagccgtcaacttctctgccctgtgtcctcctggaagggaaagggaaggcctgccagggcctgcagagacaagcagccatgtggctggtcacggtccaagggaacgtgtcccactcacagggcctaaagcgggaagaacacctccttcatgctgcatgagcaggagcagatagtgtttacctcttttgtccgtggccctgtgtgggggaccaagggaccgcatcatcctacataagatcagcgcatgtcacagccaggcagagggctcacgtggcatgccaaccaaattgccctttcattggcaatgctgaaagtgaaggccatgattctcaattcctggggatgcgttttgcattttgaaactcagatttcaggaggagctgctgcatttttctgttcaaacccccagtctgagagaagtgggctcaagaacgtaagctgttggactcttcctcaccctctgctcaaaaggcattcttaatgagcctcaattcagaaaatgaagtgtccaagtccaaggcctgaaaacctgatgcattatagtaggatgaatattttgtctaattatttgtattaatacaacagcagcctaggtacataggctttatatgaacttatctgtggctgaactccttgtctcccagatgaggagagcctagatagtggtcttttgtgagaaatggcttgttggagggagcgggtgtgagcagttagcagaacttctcatatttatttttttctgactttgagggagaattctgagaaacgatggaaatgggaaaggaagtgagtaggaaaagtaaagggaaatgtataaaaatgaaggagagaaagtaaataagaggaagtattagagataccaaccatggcatccagcgttttccatgttctgttaatcagaatctcagcttaaattagcataagcaaaaaggaaatttattagttcacatgtctgagaaactgaggagtggataagactccaggcctgactagagccacaggctcaaataacacagttgctgccatctctctcctgccacctcacagctctacttccctgctgctgacacccaggtaaacttcccctaagggaggcaacgtggctgtgaactccacaaggctttcatattctcttctcatcaacctcagtcaaaaaagagagatttcctctcaccagcagttccacaagatcccagactgggtcttccagtccctgattgggccacatacccaccaacctcagcagtctgtgagagatgacaccctggttggccagtcagtttctgtgcctgcctggagcctaggtggagttggctccacagaactcagagatggagggaggtgggaggagtttccctggggcacatcagggtacttgtacaggaggatgtgaatgcacactgggcaggaaaagacccgccaaaggaagatgcgatgaagcgaaaaggggtcctggagaagagctgttgatgtgatggttcaatgaagatggagaaacaaggaaaatcaaacctgtgcattgctttgggtggccagactggatgataaagccaacatggtagaaaggctcttgtatcaacaggagttggtcaagatgttttctagacagcattttaaattcagagcatcccttttattgtaggctttagaatgaaggaatgtggttgtttgggcctatggatcttaaccattgctagaacctattattttggagagctctgagagttagtgaggagagagtcatgagctggaataaacatgttttgagtacctactatttaacagacaccagtggtttaaagatcaataagatatggtttctgccttctggcggaggtatgggtaatataacaactacaatctcgtgaaactctcatattctctgatgaaaaggaaatattttcttcctccaggactaagttactcaggctgtgcttcctggaataccaggattgacttaggtgtttcgtgggaaaacaaaaacagaaacaacaatttgtgtcttgacagattaaaagatgttgtaccttctttccactgggggagggaggattggcatttgcaatgctcgttgtcatatgaatggctccaagaagtttggcaataatgaaagcttttagatgttgtttaacctggcattacaactagcttatgtgatgatggtgtacttctttcatgacactagtatagtattgaacatggttcataaaacagagcccacagaattagccacatcttcatggatttgcacatgcagagccatctggaaagacctgttacccagtctagtcttggatgttgtaagggacctattgagtgtttccccaggcctaggccacgcttctcaccacacccagcttcctgagaggtttataacgcagatcagataacaccagcttctcctgtcttttgcctctttgggttttctcctcaagaactagtcacagtaattctgttctttggagtctgggaagactgactgagattcactttactggtatcatcatctactggtggtacccaagatgattttggaggtgcatagctacatcattaattgtgtgaagaaatgctttttccctctcagttctcctttctgtccttttggccacaatgaggagaaagtcttagtttggagctgctgtgtctttaatgtttctattacgtgtggatttttttttttaagagagcagccctcaggctcaaagccttcagtaggtcactatgtctgaactacatttttaaattattttgttttcactgtacatatttctctgaatactttttacttatgactgtaggcaccttctgcttatgacagatgatcctggtctttatgatagttgtataaaattccctttaaaaataaatataaggaggagtgggtcaacttagatcaaggtttcttaatcttggcactaatgatattttgaaccagataattctttgttgtggagagttatcctgagcactgcaggttacttatcagtgtccctggcttctacccagcagaagctgcccccaccaaagttgtgacaacacagaacatttccagacataagtatccctatagcatgaatgccccaagtagtgtaaaccaccagtttaaagcagagtgatatagaagtgtagcaatagttgtgaaggtcgtgtggatgaccagatttgaatcctgtattatggttagtgggctggactgccactggctgccataagagctgggcaccttcaccccaccccatcaccctctccacttcgaagtctttccagatggctctgtgtgggcaaatcagtgaaaatctgtggtctctgtgggttgttggtaagagaatgagctttggaccctgttgcatttggggctgtccattcttttgcagaagcagcagaagtccagggagggagcactgggcagcccagccccatgacaaatgccaagtcaccagaaatcaaaagaggaatgctgagtcataatttccttcattcaggaattagcatgtgcttttgagattttgaactacagtgcaatgcagagctggtgaatgagcaaggtttaaatattcatttggcattagcatctgtgaggatggccagatactttcattaattggattcaggttatatgtgtttcgtttaaaagcagctgcgatcactaatggaatgacctctgtgtcactttccattctgaagcaggaggcacgatagctcctcttaggatgttgtgtttgccacttgcgctgacaccaaatgctggtaaaatatggttgctccccgctttaaaaacaaaattttgttttcatttttaataaagagacagatcccaggcttgaaaggcatgggacactgggcagctatactgatggctgcaaaggtgtgggatttgggagaagtcagttttctctttcctatccaccacccttcttcctccctccagcctccaccaccttgaaggccgtgagtccgaacaggggacccagagacaggtctgggtgtccaggtggttccccattctacattcagcatggggctcacctgccacccactcttgcctccatgtcccacccccaacatgcacacatgcctctctaggcttaattttgagcatttagaaaaacataagaccacccccacccccagctctcttttcatttctccctttcccaccaagattcacgcagaccggaacagagtctttcaatgacaatatactattatgttagtataataataatacatttgtttgctcttattcctagcagagcagccacggagtgctctgttaaaatgttagatgagaccctgttactcctctgctaagaaatctcctgaaggcccaagtgctcccaaggcccaggagaccttgccctccccttggcccctgacctctgccctcaagcctcctccctggccctggctccctccatgccagtgggtgcggcctgtccttgcagctcctcggacctattggatgtctttttccttgatgttccttctatttctatttcagtatctctttcttcctttgcatctttgcttaaaagatgtgtcctttgcacagtcttccctgttgagaatgaccccttctcccaccccagctacctctgcttcttgctttctctctacagcctcagagtcctccacgacactctgcagccctcatttcccatgcaggttgcatgccttccattgcgggaatccaactccacaagggctggggtcccatccgttgtagtcattggggtatccctggcatctgacacacagggatgctcaataaatgttggtgagtaaatgactgactgttactatgactgtattagtccatgctaattgcattgctataaagaaatgcctgagattgggtaatttataaagaggattaatggttctgcaggctgcacaggaagtgtactggcttctgcttctggggagacctcaggaagcttttactcatggccgaaggcaaagagggcgctggcacttcatgtggctggaggaggagggagagaagggggaggtgccacacatgtttaaacaaccagatctcacaagaattaattatcaaccacagctccaaaggggatggtgttaaaccatgagaaaccacccccatgatccagtcacctcccaccaggcccatctccaatgttggggatcacaatttgacacgagattttgtggggacacagatccaaactgtatcaatgactgatagtaacagcagcagagggtgtcatgggttacagagtgcctctgtgtgcattttcttgctttcctcaccacaaccccatgaggtaggctaggaaggttttattatcccactttgcagatgagaaaggtgaagcccaaagatagccaggggtctgttcaagttcaaacagctagcaacagtgaacttgaacttatttcttctgtcccctgggctgtttatctttgatatctgacatggctgattcaggcttctagaattctagggcagctgcaggtgaccccagtaggctgaagttaggagacctaggtaaacgagtgtcatggtgaaatcccccccgctcctgagaccccacaggctcctcccagacaggccggcctccttaggccttgggtataattagcctagaggtctccggccttgatacaataactggtaagaagctatccattctgccgttcattaagacaggtgacacaagatgaaatattttaggtaaatcatctggcctaatttagaaaggctctgtagggctagagcctttgatttatcggggagaggtatctgttatcagagcgtctcacacacggacttatttattatccagaatctgtttttaatttcagagattgtttacctaaactgctgcgtgtcagattccaggatggatttctgcttagcatttaattttagatacttgccatggtggacagaaaaaaatgggcctccagaatttgtagtttcattatgaatcttacccttggcagcccctaccagtagtttgtctttgaaatctccttggtacttgttaaccctgctctgctgtgaaagagatatggtttatttattggactttgcccatttatgaaaaagtacagaaattattaatggtttagtagctattaatgcattacttgggtggaattcaaattctaatatttatggtaaacccctttataatgaaacgggcagagaatcagctctcttgctccttaaatttggaaggctctggatgccattggaatggctccctgtgaaatatgagcccttctggcattatatttacacccataaataaaaaataagtactttgggttggaggagaaataattaagaatatttgtgtagataataaagaggaaatggtccagtttggttaagtgtgtgtttaggaaatgccaggggctgctgggactcgaatgagggatgggaaagatcagggctggaggactgtgggtgtggaggacttctggggacttgcaggaagggaagccttgtggaggccatcgtgggaccatagtaagatgtgtggatctgggaggcttgtttggattccaagtcttccctaagttagtacagctctttgatagcagttgaacttccctggacctcagcctcctcctccataaagtgaaggtgatatctcacaaaattgtcaagatggtaaacagtgtagacttagaattgtaataaataatctacagatctctgtatatgaggcctaaagagagaactcgggtatggcaagcatctcagagcaggattggaaaatacatatacatatgtatgtacatatacacacatatagagatacatgtatttttggtgtgtgtgcataattgctggctgtcgagtggaagatagggaatatagaatgggtatgaaatgaccttaatatggacattttaaaaaatacggtctcagaatacaataaaatgcattgagtacctcttacccaccagggctcttctgcccgtggaatctgttattgggttaatgttccctgatctttttctagtccaactgagcttctttctgacctcttcctgttagaagctaaagggtttggttgaatctctacatctgtaagcatctggtaatcagctgtaaaatcaacatgtcataacaggaaggaatctcaaggagcatcttgtttagggatggcaaatacattttattgcatatgaaagctatatagtggtggcttctagaagtgctgaattgagaaaaattctgacccatagccgtgtttagcaggaaagatgcgtgactgatgagtggtacctactagagttgatgagtgggaagtagtgatgttgtgtctcacatcctctcatagtttttgtttgtttgtttgttttaagaaggaaactaaaacctagcacagtcaactggccaagctcacagagttaaatctctggcttccaattcaagtgatactgaggccacaccacactggtgtggttactacagacctcctaggaggacagcagtcagctgcccctgacttaacagagtaccacttcaagtggacatagtgtttgacatctccttgacgtgtctgatggccttcacagagagccaagaagccaaggcccaagagactatttggatcgatgatgattgtgttaatgataacccatttatttagtatttctatgtccctggtcctataccatgcctttgatgcttgttttctcatttaattacaacaatcttatcagtgggtgacaatctcttcattatgcacatgaggaaaaaggggtccagataggttaaactctgcagagtcacaagctagcaagtctcaaagtctcacagactccagagcatgtgtttttaatcactggacatctcctttgtgcttgtgaatggtgccatccctagaggtagcatagatgcatcctccgagtaccatgaagaaagatgtacatgtaaagtagcaaaggaagctggggtcagtgggtggtcgatgctcctgacagacaacatttaggcgtcggggaagaatgtccttgccatctcatacagagtttccctatttctgtgtgtgctgccgtgactccagcaagagttggatggaattggggagatcaagtctccagttctttatttctgctccctgtagctaattgcataatgactcataaaagttaaatttctggtgagcatgtctgccatgctgttttgctaacgggcatggacgtttcctgacttcagaagaaaatgagccctgatgctggagaaagggacaacctttccccctaacaaattttgcctctcttgtccctaagttatgaggagcctgagtagacagtctcattctgggagctctgggctcctccccatggtgctccaggggctggtggctggcttgcattgagcctgtttactgtgtggtgaaggcagaagacctggtcattgtattcctaattttacctgagttaactatagccagataacacaggtcttggactcaggtccaaattcattcatccaccaggcttatcctttgtctgcctattggcttttaaatattcaggttacagggtataatcttaacatttaggttaactgtcaaataaaaataaaaataaaaataaaaatgaaaattaataaggtggaaaaaaagaagagagtgtctttatttacaacttttattggagctggtggaagggctccctctcagcccttgtgattcctgtctagaaaatgggctcttctctgcatggtgcagtcagcaaactactggtctcctcctgggctgggtgtgggttgctgccctgcctgggtcacatagaaggaagctcaggaaattctttgatccaaagctacttttctgtcctaggaaaggggtcccagaaggatttcacttctccccaagatagcaatgagaattgctctcattgctgctgatgatgatggaggaggaggaggaggatactatgttagcatttgagtagaatcatcataacctggcaggcattgttctaagtaattaacataattcttcaatagacttgaagttgctgttattgttatccccattttgcagttaaacaatagcttggcccgcttggtggctcacatctgtaatcccagcactttgggaggctgaggctggcagatcacttgaggtcagcagttcaagaccagcctggccaatgtggcaaaactccatctctactaaaaatacaaaacttagccaggcgtgatggtgggtgcctgtaatcccagctacttgagaggctgaggcaggagagtctcttgaacccaggaggcagaggttccagcaagctgagatcatgccactgcactccagcctgggtgacagagcgagacttcatctcaaaaaaaaaaaaagaaaccatgactcatttattccctcagggtcatattattggtacgtggtggagctggcctgagaatagagtctgtgcttggtgactggaagagtgtcttaggagaggaacacttccctttccctgtcagtctccagatgcttactctcctcttcttggagattgttttctttttgatcaaaattaaatccagaagagagagggaaaatcctgatggagcatctttgcaggccccttttatcagggcttttctctggcttcatctacctgcctgctccacaggccccaatccctcacctaaacccctaaggcctatctattctttgtctgtcatgaacagttctccaaatctttattcaccctaagttatagatgaatgacagaagatgaatgtgtttcttgtcccagcaatatttgtattttcattgtagtcgaagaagtgaagatggaatttcaggtgcaactgaccaggtgctgcttcccactctatggtctttatatatccaagctaacctgagatgcaaagctaggaattcacttaaactgtctgccattccatctgtttggacttgtctacaagccaatcaggaagacatatgaaaggtgaacagaggcagcattttagctccttctgcaccctaggattgtacagtgccacagtctccagtagcatgctctgaacatgatcactgtatcactcttccagatggaaggtgatcctgcaatcagtgggctttgcttagcacagtgtaggctacagtcagaaacctgactctgcgagaacattccttaggtgccgggagcaggagagggaggctggacactccatgttgcctgaggccaccaccctttggactaagagacagaaagaaaatcgcgctcacctctggaaagaccaagtcgttgatgtcctgcttcccctcttcagggctgttctacctataaggccatctcctgaagtcaccgtgttttttatataacattttgtccttttagaaattatcctgacgcatgtcaagagctttcacaccgaaaaaatatgtcacattagcttccaagtttctgattgtctaaataacgcagcaactcaacatacagctgtctggcattttgacagtacaataacccataattcttcctgccactcaacacttcaaggttagcattttgtagtttgctctcaaggagtagtcatttaaattttcaagagcaaagaaatgaatgtggctgcttcatacctctcttttgatctttctttatctgggtggtttttccatttatattttccattatatattttggaatgcttatatttgggtgtaaacttttcttggagagttagaatgttgtatcccattctccagatagatgggaataaaaatgagacatatctgctgagcttcagagggcagctgccctgtgagcagttcccaagcatttgcagtggagtaaagcaagaaggaactagtaggcgtatggagtagtttatgactctttcctgcctcctttcagaaggcaggtgaagtacttgcagctgcattctgaggaaggtggagtttccagtttctaccttctcttgagagaaccccacttgcttggtccaacctccatccttgagtctcaaggatgagtcttggaaacccaattaacatctttgacttagctgctggtttctgaattgtcctaactggcttggttgcaactggtcatctttgtaggcacattactacccctaggtgggaaactgggttataaatctggctttcattaattacctctgtaaacttgaccaagtcaacagttttcctctttgaacttctttccttatttctaaaatgaaattactagctcttgccatacctgccactctaggcttatatagctgggataagaagaaacaataaggataaatgtgccttgaattattgagagccatgctatctcaatattagacattattgtgaagtttttctttcaacccactgccagtttttatcccggatctaccttcctgcctgcagtaatttagtggcttattgtgatgtgtgggtcactttctgagacaaagagagtcaatataatgccttctgccatgaacaggctttatttagtggcctttcttggactgtgttcaagagtaaactcttggatcttaggcaccctgaggatatctcagggtttaaaattcctgagataaaataattaagttttagatccataactgactgacagactcaatgaatgtgctttgcctgggaaaagcctaacctctccaaactcaccaacccatgtttaagcccatgaagttaagcacaatttaaaagcctgaatgtgtgtgtaaaaagaatcactgtgtttataggcaatctgtttacactttgaaagccattagagtgatagtgataaaaatttaccagtttgggtcctaaaatctctaaaacataatttgtttgttgaggcctattggaattgatgaagaagagaattaactcttcttcggcatccctgggactcactctgacaagtctgagaggggctggaaattatagaagatttgaatctaggttcatggggagttttgaacgtgtggaatttctttggttcgttgcttttggtgaggaggaatccaggtcaattttcccctatttattaaaggttttatgacccctcttcttcagaattggcaatttcatttgctgtgcatttgctacttctaactggagagtttgaagtctggtgcaatctacttgtataagatgctggagtatcacagtcccatgctacaaatagcctgggctaggaggagaacaacttgatggggtttaccacaaatgtttcgatactagcaataacacagtcacttgaattgcatatcattctatactcttcaaagcatgttgcatctgttaacatagctgatctcagaatagtgccacgaagcaggaaggactatgatttctaaaattacgtgttttttttgtttgtttggtgtttttttttttttttgagacggagtctcggtctgtcgtccaggctggagtgcagtggcgtcatcttggctcactgcaagctccgcctcctgggttcacgccattctcctgcctcagcctcccgagtagctgagactacaggcgcccgccaccatgcccggctaattttttgtacttttagtagagacggggtttcaccgtgttagccaggatggtctcaatctcctgacctcatgatccacccgcctcgccctcccaaagtgctgggattacaggcatgagccaccgtgcctggccaaaattttgtttttaaggattttttcctgactatgaaaataatgcatattcattatagaaattttggaaaatactgagaatcataaagaaggaaattaaggttgcctgtaattccccacttcccagaaataaccacttaaaaccttctggaatatatccccccgacacacatactcctttctgtatgtatttgcacagatacctgtagattagatttttaaatttgagatccttctataaagatactatattgttctaggcctttcacttataaacatttacccatgttataaatagttcttgaaaccccactatttaatagctgaatagttttctgtttgaagagaggattataatattgttgagtaactaggttattttcagttgttccttattctactcggtatcatgaagtatgttccaggacatacatctattttttttttttttcattttaaacacagctctgattatatcctaaagacaaactcttagagatggaatggctaagatgtttctgtctagttttcgaggactattatgtaaagtgatagaaagtcagggattttatccaaatttgatggtgggaaaactgaagatcagagagttacacttacttgcctcagggtgcagagtggagcagccaggtggccccatggaggcactcaccttgctggcactcttaccacctgggaggtgaggacagcaccttggcaaagctaagctaggttacagtgtggccattgtgggctctcttcacagcccctatttgactgtggtttgtgatactgatggagattaacgaaattgtcattctgcttcacgtcactgcttctcagagctttctgggcttttcctctccccctctctccccaactcagtgctctctcagagtggctgcagcccatctgcctggcatgtttgcttgcctttctttttaacctaaaacattttggaggatgcctatcaagttccacaccctgtgttggctgcaaggggtacaaagatgcgttaattcagtcctgaccctcaaatgtcatctaggatgagaatgcgaacaggtaactgtggtgaagtatgaagaagacataatcctggggctgtggaagaatcagaagtgtcccgtttgtaaagcatatcatgctgttcctggtgcatgacaaacctctagtctgctgcctcagtggacccctttgtattcctattctatagtatttgttttgaccagacttatccccaaaagtcttctcacttttgctcctttttgctccttgtctgctttgacttacttcccattgtttttgtacgcagtgggcacctaataagtaatcgatggtgtggcctcatcacctggcctctgggtacctctatcctggccctattcttgctacttgtaagttcccaggaatttgcacctgtccctgagtctcattttccttatttgtaatattaagggaagaaaacccaaataactgctaatgaaaataatagcaagcatgtattgagccttattatgcaccatgtactgttgtaagaactttacacatattagcttattaaagcacacgtcttcgtggggttagggttactgttgtcccatttctcaggtgacgatccagggcccaaggccacatagccgggtggtgggaccatgaggcaggcagacattagagattactctcttgacattgtcctctactttcttaggacccttgccttacattgtacttggaatggcaaaacacttgtggtgtaatttgggagttcaatatggttagtttgggagagcagaagctctcttgagttaataatgtattgcagagcaggcatggggacgtctaggaccttggctgttccctccccaaagctatagaacatcacagaaccagggaactgtggggctgggagagacctctgaggaagagctcctttttcaaccatccattcacttgctcactcaccaacatcttgagcacatgctatttgaaagtcattatactacatgttgctcttgctatggagactaaaaacaggtatgacttctgctctcaggaaactcacaacccagaaagccgggaaatagcatgtcacacagctggtgggactgttgggagagaaagcagtaaggatgaaaatgttttcagttgaaatgcctaattctctctagacttccaggaaggggcctgacaattttggcacaaggactaccttctttccagtgcgtggctcatgtccctgggtctggcaagtccagaattagtagtagagaactcttgtccaaagcactaatttggaggctgagatttattgttgtcacagcacctggcttacaaaaataagctttgtcataatggaggaagaaaagggaggaaaataaagccaggttttagatcagttgcagaatttttttcccctgtctattgaagtttatagtaagtcaaaatgcctggtacccagattgatttgaatgaaaaaaatagatatacatatatatgcatgcttgaacaatgtcaggcttccaatgtgcctctagttcctctgtaagtccccaatctaggagtttcttctgtagcttgattccagcaagaacaggcgctgcttcagtattcatttcagtggcgttgacaatactgacaatataattgacctaaaaagttctggatttcctgttaatgcactttagaaatgtacatcaactaccaaaaaaaattcatttctatctacatttcacttgatttccattttcaagagagaggcttcatcattattattctatttgaatagcactgatatcttgaaggatggaaggagatttctattgtatgcgggagtactttatttcgatattttctttgtctgattatacatgataaacacacattagtgacatttcgtgcatgtttggaagataaatggggatatctctttaaaccattcctgacacttgctaacctgtgagcttaatggcattttctctttgattcaataatttgtctgtcaaaaaaaagctgggctgacattctccttgttgtgggattgaaatggaaagaaatctcttctcttgaagataattttttttttaaattgaggggaacattttaggataaaaatgtttttgaaattatttgggtttttggtgatggaggtggaggacgggggctgggaggatggcgctgatgaatgcgagagccctgacattatatgtgtggcaagtcatcttaaaagggggcccattacctccatctgcaagtcctcttgaaataattagggaacgtgtgaaatcttgcaaatgaagatggctcctactgcggtgtctcctgggagccatcagcctccctcccggtggaggtggtcgggtggggtgtgcatctgtgtgcacaggcatagctctgactccatgcacctgtcttagttcccctggatgatggagaagtcccctgaacaatggtgagagggaaggcagtcccagcctcatgctggagaggctccaaatccagatgcctgttttatctttggagattttggagcagcctcattcaggggctgtggtgaatgtgaatcgagtggtgaacctcgagtttaggaagacatatggtgggctgcaggtgaggcttattgctcatgagggaggcctgtgcatctgtgagaaaggtggcctcacatgttgggaatgagggaccatttcagagctgtatcatgtgaccccaggatgtgttgctagcctgtctcctggggcccctccgtgccctgcatttgagggtttcttggaagtctgattacgtaaagttgatgtgaataggcagggagcagaatggaagaggatgcttggtgttgagagtctgcttccctcccttcccgcttctccaccataaggggtcttcacatgcaccattagaaaacaaggacttattaggccccctcacgttgattcattcaacaccttgtatgtgtgccaggcacagttctaggccccggggaggcaccccaagtcatataacttgcccatagtgaagtcaggaataaaacccaggtttcttgattcctgatctgatgcttttctggcacaccaccctgccttcctggagaccccatctcctgcaggagcctgaaattctttcgcattgtctggttgttcttccttatggcttccggttcccctgtctgagaacgcaggtcagtcatttcatgctgggttaccctagcaaaacacaacaaacacaaacaaataaaaatgaagtcatcaaccatcacatgtgttttcccaggctggatttcccactagcaaatagggcccttcaaaacctttgaacatcctgagcactgttactttagaagccccatcacacagcgtatcaaagatattaaaattaacccccatctcatattaaacatgatttatgaagtttcaatgtgaaattttggggatggattttaaaaatcatttttatagttttgaagtttaagagtaaattcattatggcttaaactttgttatatttaactgtaaagcttgagttgatttgcacttaactgactgatgaatataatgtttctttctgttgaaatttaatgaaatatttatttaatttattattttcatttattatattattatttatttaatgaaacatttattaatcttagttttgcaatttttatttcacattttagagccatttattttcagatatcaaacatttcattggcctttaatgagtttagaggagagcccttgacgctatgcttgtagctcctcatggatgaaaggccctgaaaacagacctctttgcagctacccacccaaaaccaaattgtatactgcaacatttgctgcccttggagaaccccaaatgggcttgttggaaaacctcttctaaaatccctgggactggcctgagtgtcatggaagtgaccctgagggctcaagaagaactgccgtttctacttgccatggtgtcttactcagcttgggctgccataaaaaaatactgcagaccaggtggcttaaacacagacatttgtttctcacagttctggagtctggaagtccaagatcaagagccagctctgtttctggtgaagacttttcccagcttgcagatggctgcttttttgctgggtcctcacaccctcacatggtagagacagcacaccctgttcactcttcttctgagggcaccagtcccatgatgagggtctcacccatgtgacctcatctaaccccaattctctccaaatactgcaacttcaaatactacttatacaaaggttccacttcaaactactgtcacattgagggctagggattcaatatatgaatttgaggaggttgcggggtggggcacaaaccttcactccctaacatacagtgtggtggaaacacccaggcctcagagtctgtggctgtgggtttcacatcccaggcccaccacttttagcagtggttagcctccgaacttcagttcctacatctgtaaaatggggatggtaatcaatctgtagggttgctatttgcattagaagtaatgtttataaagggtccagcacccagtaggtacctcttctcattgtaatttacccagtcatgtgagggcatctttaatgaaatgaaacagcagctgttatgtgtggagttacaacaaagagacacacacacagagcagggagacaggccaggagcatgtctggaggcaagaaaacaggtaaggtccttggcattgaggcaaggaggggctcctacaaaaaaagtttttttcctacatttctgggaagtctcaggctttcagggaactcctcaggttgtgccagactgcaaagagtgggctgagaggcccagccttctgggcctggggatgattcaggaatgaaagatccccaagttgggaagactcagcttgagggtttttcaccagaaaacaatctgcagtttatttatttatttatttttgccatttccagaatggaaaacacaaacggaaatgatgagttttataaatataggagttttgtgcctgggatggaggtggggcgttggtatttatgtgcaaatagccctagattctgcagattaccagtatctggggaaggaacaaatgcccagcatttagaaagccatcagaacagggagcgccacccctggctgcgagaattggtgggcagtgatatggcaaccctctttcctgagtactccaccattagacgggattggtgggtggaaaatcagaggccatgagtagtctcccaaatccttccacttgagtcagcctgcagccaattaaccttcctgaccgactcaaggcaagcctagaccacagtggaaggaacgtcccctggcccaccctctctctctaccatcctctctcccttccttctgccactcaagtgagtgctcagtgtgtatcaggcactatcctaggtgcttgcattaaatccatgggcaaaatggaaaaatttataatagacattaaacaataaatatgtctcataaagacgttacacgttggagggcaaaaaatgctatggaaaaaagaaaaagagagcaggtaataaaattagtagtcccgggtggaagtggcaggacaggttgcagtattgaacagggtggtcaggagaggcagcattaggaaggtgagatgagtaaatggcaggtaagtcagttgagggtgttgaaggacaaaaagattataaaatgaactgtctctgagctcatagtgtctgatagggggaggaagaagccagtcaacattggaatgcctggaatatcatttcttcctaacaaatctgagcaatgtggcttagggagatgaagaatacctgtgcctgccagtccttaatcttatgtggctcatggtaccgctaggcagtgcttggtatcagatggagattgggacctgggtataaagccagagttctctagcccaggtggggtttttgggtttctaatggctcaaaacgtttgttggatgaatgacatgagtggttaaatgaaaaactgagtgaataaattcatcaatgagcaaatgaatgaacaatgaatgaataaagactgattaaaattcttatctgtattaagaatagataatttacaagttcacaccataagttactagttgcacatttagcttcagtagtaatttttaaggtgctttgctatatttaaaatatataggcatttacaccattgagtaaattttcaaatgtagtgaaaaattatccaattttaaatatgtttaggtattatggtatagtccgaacttagattttcacttatagctgtaatcaaagtagaccatattttctgaaccagcagatgactttgcctcctatgtagagtgagagcagactgcttgataagcttgtgaatcacagtttcttgcttatggataattgctgctcttagtcttgagacatgacatagagattgacgcagagtaaactgctggtctgctggttactaaactttgcatattttcagaaagacctggggaaacttacagaaagagcggcagacagtgtcaggcaggccacagactggccacccccaggtctactttatcagaagtttcaggtatggtctccaatgtctgcagtttaaaattgtttctcaggtgattttgttgtcgatagtgtaggggattaaggaaccactgcaccaaagccaactttgagagcaggaggtatgtccttttcttttaatttttttttttttttttttgagacggagtctcactctgtggcccaggctagagtgcagtggcgtgatcttggctcactgcaagctccgcctcccaggttcatgccattctcctgcttcagcctcccgagtagctgggactacaggcgcctgccaccacacctggttaattttttgtatttttagtagaggcagggtttcaccttgttagccaggatggtctcgatctcctgaccttgtgatccacccacctcggcctcccaaagtgctgggattacaggtgtgagccaccatgcctggccttaaaatttttactttattagtgtctatcaataaatggataagtgtaaatcctaattgcaggaagccaaatgagacagatttatccccctccaacaaggtagcatttcagtcttctttctttctctgtctctctttttcttattttgtttatcttctccctaaacataggacttctctgtatgtattactgtactatgtgctttctctttacaattctgatacattatgcatgtctttcaatacatattaaagctacatgatattccagaatgtggaagtgatccatcctttcaacttgttgaaattcattgatttactcaagtgcttccctcatagaaaaatgttgataaacctttgctgactgaataaatgaagagaacatagctatcttgtaccatccaccccacgtcagtttcccataggaagtttggggttaaaatcaagccagtttccttggcacatgtagttccagctacttgtgaggctgagacgggaggagcacttgagcccaggagtttgaggctgcagtgagctatgattgtgccactgcactccagcctgggtaacagagtcctatctctaaaaataaataagtaaatacctaaaaaaaataaataaatgggccaggcgcggtggctcacacctgaaatcccagcactttgggaggccaaggcaggcagattacgaggtcaggagatcgagatcaacttggctaacacagtgaaacccagtctctactaaaaatacaaaaaattagccgagcttggtggcgggcgcctgtagtcccagctacttgggagactgaggcaggagaatggcgtgaacccgggaggcggagcttgcagtgagccgagatggtgccactgcactccagcctgggtgcagtgcgagactccatcttaaataaataaataaataaataaataaataaatgaaccagctgagacttagttcttcttaggaaggttctaggctgtggtgagaacccctctaatgcaggggttcaggcaggcttgaaatggagtcgctgtttcacaaagggaaagagaacagatccgccaatgagaaaagttgatggggcagaggcctcaggcaaggtccagaccctgtcttcagagtctgtgaacatttaaggagctaagactttctttatcttcctggagtgtccacccactaatatagggcaggttatggtgaggactgtgaaagacccaagagccctggagctccctgtgcggcggctgagggtgttcagaggagtgagggtttgaactgagttcagaaggagagtcagcctgagctccgctgagcaaaggctctgggtgactctgccgcttacctggagagaaccgttttgcctctgtccggccatgtgaagaccggctggctagtgtagggggctcttggaaaccaggtgggtaagaaaccaagtaaactaactattctgttgtttctccaagaggagaaacagcagccacaaaaacctcagccctctgcagagcgaagctccaagagcccctttcacagacacataaatatttaataatcatctgtctacaaccaatctaggggaaaaaaatctttaaatagactgctcgaaaggccaaaacctgaattttaattgaggtactttgaattactcccattagtcagtcgctctgactttttcttagtgagggctggattgtttttgaaaggggaatcgaaattattagcagcccttaaaaaaagaaaaaacctgctgatcctactaaataataaactaggcttctttttaaaaagacgtggctttctaggcttcaagcaagaggggaaagtaagatgagccccacattttagagatgcaatttgaaaagcaagcgttaagggcattcagatgcctggctaagcagttcctcggcaaagcacttctgcaatgctccctggtcctgctaaagtttgcaggatggagaaggcgtgtgtgtgtgtgtgtgtgtgtgtgtgtgtgtgtgtgtgtgtgtgtgtgcgcgtgtgtgtttatatatttattttccgtctctctgccccctgggcctgcagtcttctgtagccgatgtaacaatcctcctggatgaacctcttgtatctcatgctagccaatttcgacagtctaaagtgctcaaattgagccattttgttctctgtaaaataaacctcaggccattatgcgtggtttttcattcacccgcctccttgtcacccttcccttggcccctctctgcccaccctcccctccttccccattctctcctcttgctccccctctgacgaatgggagggaagcagacatcctttaggagaccgctgttttcagtccaggcatgtcaacttcactctggcacaatttgctttgagatctgtggcatggagcagggctacagggtcaccccccaaccataattgatcttgcttattcatctgcttcctgcgtattgccctctccccatgctggcctttgtttggataaattgttggaagatttactgtggtgctgaaagccacctgccctggtgtccccaccacctcttccagggtgagacgatagagtggcacttagggaagaaagttctcccttctccccgccatcccaaacctagaggacatctcctggcatcacaattcaggcaatttccagactaatttactatggaatcacttttcacggcccttgtgcaccggtatgagaaatgttaattggtgtgtgagcctgagatgctcttccaaaggatttatcgtcagaatcagaggaggggaaggggagccgaggccgtctttgtgatggcttggaggctgcactcactcgcttcagattatttttaaaaccaatggtcatgatggatctgaatccagtaatttattcgattttgggtcattaacccttgttctgcttatggcagcaaatgacttcatcgtcagagatgatgagtgttccgaactgtggggatacttggctctctcgagctctcatctgaaaatcaattttaagcaagtggcaggcattagaaatcctctctgcttataggtttctgcagcattgcctctaggatttgaagaagcagggagggcgggggccggggagaagcctctggaaaactcccattgccggggtgtttgcgttggggtggctaatgtcctaagaaggctacacaatagactgtcaaaatggttctttcagagtggggcatggatcacagtttagaaatgggggaaaaggaaggaaaggagcaggcctccatggagtgatcctgcctgtagactgaataaaatagcttgaaatcattgttttgattcccattgactgaaggctggaggggctttactggttaagcttttaaagccgcagcagtttaaacacttttttttttgccttttttgcctgctgcaccctttctccagttgactttgaaacacattaactcatctttggaaaaacaaaaaacaaacactgtttgccttcaattccgaggctggcttctctcttgaggtgttatataaataggtggcatcatccagcatcactgtgcagggcacaggggactggcgtggccagtgccaacctgcctcccaccgggtacacactcccatggctgtccacactgcagtcctctgccatgctggacaaactggctggcagtgtttcggatcagagaatttcttccctgcctctgaagatggaagcaatgtttgatgggtgttggagagctctctgagaaagggcccatctttaagcactgcccatgtgagcctgtgttttccttaaacatagtcatgggagatcctttccactgctgactttttaagttgaaatatttagggagaaaatatgagttcttagaaacttttaagtggaagagatttagtaatgatttagccaatccccttatttttttgcagatgaagagcctatggcatagatatatcaagttccttgtccaaaatcacacatactgcagggagcagaagtgatcctgaacccaggtctcctgagcagtggagtacctggggtagggatggcagcaggttgctcaggtgcaggtaataagggactgcactgtctgcagggaatttacaaacaataacaaagcccctcactctgcttttaatgaccaccatgagctgattctcaacaatgtcagagctaaaaacacccctttctgccaaggtaggtgctcccactagccccctccccacctctttgggacccccactgcttctgactcccagttctgtgtttttctcactacactaagatgcatccctcatcaaatagcaaccaaacaaaaaaacaaccttatgttagaagttccctgcttcttttggaattaagtaaggaaaatagccttttgatgagctcacattagccaggaatggtgcagaaaagtgtgatgtcttaaaattcgaagctagggggcccctaaaaaagaagtgttgggatttgttggctctctccttgcctgcatccctctgacatgtgagtgtggattgcgggccaggagctcgcaaccttgctctaggtagattcgacagagccagggactctctgcgttaccttccaaacctaattctctcccatgtatcatcagagcctagggggaacctcccagtggtctgagggcctgaccagcttttatgtgtgtctctttgtggtcatctcggccagactggttgctatccaggtttttcttctcctccgcagccgctccctgaaatgggtgggtaaatatcccagtctgacttcagctgccgagtcatcagtcctgacagacggctgcctctttgccgagcaacccccctcactgcctcctcccccagcccctcatttcatcttccccctgtcagaactcaccctctggcagaaatcttttccgagagctaaatgtgagcctcaaagagatgccgtcaaggtatttttcataattttcaaaggtaatttccttccctctcccccacccgccttctctctgttataattatgtcttagcagctccccaaatcagcatagcagccaagttccctccccctgaaggtggccgccttttctcgcacaacagtcctgggaaaaggccttggagagcaaggctagggagccaaaggcttcctcaccattgcattgagaggcaagctggtggccttactgtcccgggatgaaggaagacttaaaatggctttgtgtcacttttggtctagagagtccactgtaccctgaggtatttccctaagtgccaggtccatgatggtgtttagggtactcttaatctaatttatatccttttttttttttttttgagacagtgtctcactctgtcgcccaggctggagtgcaatggttcaatctcaactcactgcaacctccgcctcccgagttcaagcaattctcctgcctcagcctcctgagtagctgggactacaggcgctcactaccatgcctggctaattttttgtatttttagtagagatggggtttcactgtgttaaccaggatggtctcgatctcctgacctcgtgatctgcccaccttggcctcccaaagtgctgggattacaggcgtgagccactgtgcccaggctatatccatatttttaagagtaggcaacatccattccaggacattctctgcagtttctttaccctcccactccccctctcatgcctccttactctctcaggaaggagccaaggaaagaattcctctttctccctgaatcctgacctctgtcacctctgaatcctgcctgtggctggccctcaacaggtggcctggccacaggaacgggaggaggactggcctgtctcaggccctctgcagagatgcaagcatggccagccctggctgaacggagatcctgagggtaaattatcttccactaggaatcctgagacttgacattcaaaaattctattcattgaaaacagactagccctgaaaacctggtttagtagataaaatctgtaaccacaagaggataaatcgagtttggcttgtttgtactggtctaacttaatatgatctcccttggagtttccagcatctagattttctagatcattaaatccattacttttcagtgttaacttttttttaggaggatggggtagagagtggatatattttttagtggcatcccacactaattgtgggagcgtcatcaaagctcattttgggtgtgaagtgactaatttctaagcccaggggttctgaaggaggattttcatccatttatcacaaaagaccccaacagccagtcaggaaaggggtctgctggctatagccactggtgtagtccacccagaagaatgaggagaggggccacttccaatcccctaaaaatactgaatgccaggatgaggggtgtgggaatgtggccatctcgtctcccgtacctctggatgctctacggggccatggagccattgctgtgagccagtgtgtgaccatgagcgagtgggccaccccctccatcctcagttcctccatgtgactagtggagcagatctcacctgcctctcagggtgagtgggcgaggcagacgagggctgcatgtgaggatcgtgtgcaagtcttaagtgctcatgaaagtagccatcaccatttccttaagattaacgcctccgagcctcagtcttcattgtttaggaaagggattctgtgtgattgagattttaacaccatgtgcccttcccctgtggagtggtggcatcttaaagagtgaatattttgttccagctctatcctccagggattggctttgggcaggtggggcaaaacatggggccaagttctttactctgaggggagatgcataggcacatccctgacttcccatgtctccagattgcatgggatggaaggaggagaccagaggtgagggcaagccatgctggatagtgtccttccctttgctcccttcccaaagtccaggataggaggaggaggagggagtgaggctggccgtagaactccagggcctatgtgagaagactgtcacactctagggttaggggcagggtctgagtgcagttcagggttgccaggttgtcagaatggcttggagaggagcagcagccttgcccaaagctggttcctggagcgcagttaagtaaagtcctgctgtcaacattgggcttctgtttaccggttgttcaagcccttggtctgcactgggttcctctcctcgatggaccactgtcttccaaccagagttttcagccactgcactttgtcatcagacatagctgcaggccacggtgcatctcagaagcccatgtcagggctatacttttgttccaggacagagctcacagcccagatacagcatgagagctttcatgtcccactcctatggtgaagagccaatgggaccctagtgcacttgttcatttcattgtgaatttgaatccatggctgtgtgtgtgtatcgggggttggggggtgctttcctccgagtcttttttaaactttaataagatggttctttaatttttggcattatcctttaaatacatagtccttttggctcttcccccgacccctgtaacccctccaaacaattataaagcataggaacaaagcgggctgggatgtaagttgtgcaactggtcagttcacaacgaggcagtgcgtgcatgcacacatatgcatgtatgtgcgtgtgacagacactgagttaaactcctcatcattaagtggtgtccttccttgggcaccagaagacactacacagtgtcttttcctgcataattggactgtcttttcatacaagctgaggcgcttctttcgggatataagcccatgcagtctcaacaggtcaggagcgatagtaaaaacctgttgtctggctttgtatttggaataatggagtcactaatctacttgatctggccaagtcagataaaggagaaagtgagggatgcctgtgcttcagagatggaatgtatttgtaaaagcgatttctttgcgggagggggagaagggggagacacataggaaaaaaagggagcaaagactgttggaaaccttttaattagtactaattacctcagcagaaaatgttggaagcttaaaggatttgtgtcagcaagtgaaagatcaaagattgctaggctcgcattttaatctgttggctataaaaaggagtgaggggggtggtaatgggacccaggagaatggctgcccaggtggcgctgtccttaatcccttctttactgctgcagccccaggcctagtcccaattacataataagatgatttaatttttttttttttttgctttgactttaactggatgtagaaaagaggaagggtcatttttctccccttcagtgaggatggggtggggcttctgatggtagacttggtagctgcacaatcccttgtttgatttccctaatcagcaaaatgacattttaatttcaaattaaaacaacaaccaccaacccacacacagaagagcgctctttaaggataaaagggtctgtgggtatacaaagaaagtgagggcctttggttggttgagctgtggttgggcatacctggggcaacaggtaaaatgtgttaatagaaagctccacttactgggttcatcaccatgacagttccttacaagtccagtagggcagggacagagggaggtgggggggaaggccgaggaagagtggagttgacaagccacaccacccatcttagaaggcctctgtgtttctctctgtcaccaccctattttctttcctttcagaatggattaggctggggcaagggctgttagcagaccccattggtgctctgcccatattcccttggcaatcaccattcttgtgcattgccaacctgatggcttccaactacagacacctgcaactctattctctggctgcttgaaccttctcagccctcaaccaatgactgatggcaggaggttggttaatatcccagctcccttgtccctaactgagatgtcactgagaagtgatccacattacatcccataccattctagagaagaagttggtggtcaactgctggtcagcccaatatggtctgctgtttctgtttaaaaaaaaaaagtatatatatatatatataattatatatatatatatataattatatatatatataattatatatatatggtaacattgttatgcctattcatttacatattgtctatgactgcttctacatggagctgagtcttaacagagatcatatgacccacaaatcctaatatatttactatctggctatttacataaaaagtttgctgatccctgaccttacggggttaaacccagctgcccttagcagtaacccacctcatactatatcctttattgacatctttccctttttaatctcactttctggtgttttgtgtgatcacttcccaaataaatgacttgctctcacatcctcacttcaagatctgtttctaggaactccagcttaacatcatatgcccatatacacaccaaaaggacagaatccctgcagatagtgctggttcatcccatttcttccagaagccaaggttgacaccatcagaaacataatgaaacaaaatagcagttcagcttggagaactcaaaaatgctttaacatactgcctctctgactgaaggatctgtgctcaagccattgaacctctttgttcaacaacttaggctccttctaaagcttaggctttaggagataggctgcaggaaaaatctagaaggaagcctgtatggtagaatggaggcccactggctctggatcagtgagcgtggctcagccctctggggtgtggcactttgtcttcatgggaggcgtgacctagagtggccaactattagaaggctagcctcctggctgcagcatctaaatatccactccctctaggaaaggctaccagagaaggtttcaggcccagacctcctgacgtttagcttatgtctcttcagaatcatatatgtaaatgtaaagcaactgccattcaaaatctgatgtacagtccctccttgtgtattgtcttcttgtatcttcagttagttaagtttgatacccatttatcatgaggccagagagggacttggttggaagattgaagaaatagatgccccggcactttgccaggtgtattagttatctattgctaagtatcaaattgccccccaatttagcagcatataacaacaaacattatttatcacacagcttctgtgggccaagagtttggatgcagctgaacccaaggtctctcacaagcctgtggttaaggcatggaacagggctgcagtcctgtcaaggcttcccagggaggatccctttccaagctcattcacgtgattgtgggtgggattcggttccacatgaaactaaggcctcactttcttgctggcagttggttggagacctacctcggctccttgccacatggacctctccataggacagctcatgacttggcaatgaacaagggagagagaaggagaggcccagaaagacagaagtcagtgtttttgtaatcttatcttagcagtgatatccatcacgtctgcaggattctgttcattagaagcaagtcgagaggtccagcccacactcaagtggaaggggttacagggctgtgactaccaggagggagggatcactgggagtcatcttagaagatgcctgacacaccatcagctatcaatctgaacatgccactatgctggtatcatttaataatgaggtacccacttagacagatttcattggctatctttaatcattaaatagtattagctactttagaataaaatctttctgaaacttctattaccaactcctctgttttcttaaagaggttacacaaaatgtacttttatgattttcaagtctcatctcagaatctacttctttgaaattgtcattcttggacttctagcctaaagtaatcactccctctgggttcttgtagcacttattttctatattgtttatgtggcatataatcatatattgctttgtgacagttctattgttatcttgagttactccttgaatcttgtattgtttaatttccacacgtcgacatcttgtctctccataagaattataaacaatttaagtgcagcagttgtctaatacttcagataaaagcaactgcaatggaggttttatttaaatatatgttgacttttttcctttgatgatgttgatttctgattcatgatggtgattcttttaaggctactaagaaaatagctttaaaagggtaaaatagtctaaaaaaggtatattactcattgcccttacattgggtggcccaaatactctgattttttttttttttagttttggtttatttattttggtaggtggttttgttttagtttttaatctgttttcctttagtgttaacataataaccattgcttttctcccttttctctattttggccaagaattgggactagattcttgaaatactgctttaaccgagttttctgactaaatgcttatgatcttctgtaacatcctgattttgtgacatcatcattgggactgagaggcagaggaaaaaggaacacacctttattgaacactgactttatgccaggcgttattcacttacctctaggttcatgactgtgtttcagagaatgaagatggattcaagtgtgaacttcagataaatagtgtgctgtacttttatagtctgaatgatggtcatcttacactaggaatcagaggccaggtcttaggaaaagagaataaaaataaatgggtttaaggaggttggatttgaccgccgcatcagtgctcagggtcctcagttcgtaatacctggctcacacagctgcttgggatgttgcctccttgtgaaaccacttccttaggcctggatgagaaccttggcatttcttataagaatagtagtaacttagaagttgtatatgggctgaattgtgatcttcttccaaattcatactttgaaaccctaacccccagtacctcagaaggtgaccttacatggaaataggattgttgtagatatcatcagttaagaagcgctcatactggagcagggtaggcccctatttcaatacgactggtgtccttgtaaaaagaatgccatgtgaagagatgcacacatgtgtggggcggacgccgcatgaaggccggagttaggctggagcagatcccgcgcgaaggccagagttaggctgggccagaagccacacgaaggctggagttaggctggggcagacgccatgtgaaggctggaggtaggctgcatgccaccagaagctaggagagaggtctggaacagaccctcccctagtgccttcagagggagcgtggccctactgataccttgatttcagctttgtccactctaggaatgtgagacaaatttatcttgttttaagccacccagttggtggtactttgcaacaatagcccaaggaaactaatttcacaggagatgtttctggcctggatttgagtctgctacacctcatgttctgtccttggtcctgaatcagtccccttgttttctgtccgaggtctcccattaccttcaggagtctccattctctaaaaggtgtctgtgtgggaaggtatcttcctgtggtagttccagcccagttgctacttcccatggagaaagtagcccatcaacggtgatgaaaatgacttcctacactcaggcagctgtgttggggcagatctgaaatctctgagggacagcccatttggcatggggtattttcctgggctgctgtggcttccagggcagatgtgcaaacacatctgtgaaagttcagggcccctgagagctaatgagagctgaagcttcaacctgcttgatatgtttgctgtcactttcttttctagtgacgttggagaagggaaaagtcatgcagtctgtcaatcttgtcttctcccatgaaattgagaaagttctattactttcctcgtgaagactgacatctgtgccatctcttccaccactgtgggggctccttcctagatcacgatttgggccaataggatttagctgtaacccttggcagctgtggaagacagcttgccagaacagttgtcagaactcaaaggaagcagagcagtttgcccgacaatagacagagcaaaagtcttatcctcgatctaatccagggtttcttaaccttgacaccagtgacactttgggacagataatgtttgtagtcagggcctgtcctgcatattgtatgatgtttatcatcatccctggcctctgttcactaaatgctaacagcaccacccagtcatgacaatcaaaaatgtcttcagatgttgccagaagtcccttggggaacaacatagcccccacttgagaaccactgatctaatcccttcaaatcaccgtagggatctctgggggattttgcagtggtctcgggaaaatgcacagacatgtcgtattaggaaggggtagttttgggtaattgcaaggtagttgaggacatttaagggaattgtacaaggcataaagatgtcaggcttctgaagtttttttttttttttttttgagatggagtctcactctgtcaccaggctggagtgcagtggtttaatcttggctcactgcaacccctgcctcccgggttcaagtgattctcctgcctcagcctcccgagttcctgagactacaggtgtgcgccaccatgtgcagctgatttttgtatttttagtagagacagggtttcgccatgttggccaggatggtcttgatctctttacctcgtgatccacctgtcttggcctcgcaaattgctgggattataggcgtgagtgagccaccgtgcctggccctggagactcttaagacataaagtgaaaagaagcttcaatcaatgcataatcttacagattttaaatgttcagattgttcagctattgtgattatgttaccaaggggttactgtttgctggcaaataggtagggtaactttcatcacagtttgcccaggacagttttagtttacgccattttcctggcataatcagtagtagtgtcccctttattctaggaagtatcccaatttagacagcaaattttatggtcatcttaccctcgggccgggtgcagctcactgtggtgtttgtggacagcacaaatgctaatatggctgtcactcagtagagtgtgtgctctctgattccttcagtcctcgccactccttattgtcatatgtgcatttgttgtattgcagcatttctaagatgtacatttcttttacatgttagcatacctgaatccatctcaaaattgatggattcttgaaattgtcactgaccaggaggcagctgtgatggagttgctgttattagtgcacacttgaattggtcatggtggttcttattatctttgctgcagttgacttatacagatttttggtacttcacatgtcatttatgaactcatcatgatttggcattgaaagacaaaactattgtgttaacaaaaagaacataaacttgacattataaagcaaatctttattattgaaataatgaccttggttcatattttctggcaaagtaacaagcagaatatgaaaaaggaatgttcctgaggcattttaaggtaggaaaaccttgggtcattctttattgacagtgttgttgttttttgttttctagtacataaaataatgttgtgtctataattggtgcagcttggattcattgaaatgcaatgtgtcacctgactggaccctgaagatgtgtttgagttgagggccccagtggttcttttactgcagtagatatagatttgagttggggaattagatcatggatatccacacacaaagagcctgatatctaagtcagggctgggcctgggcttctgaatttttgataagtctcaggagattctggtgcaggtggtccacgagccactcttttacacagtctgatgtggtcactccccttgattccactccagaggaatctgagcccagataagggagggctctgttcatgtagtgagttcagcccactgacccctgagtagtgttttcctggatgctgcatcaaacacaaggtgagctgaggaagggctgcttggcagctttgcctgaggtggggtctgacccagactggaccagatgtgggtcgcctaccctgcttctctcagctgtctgtactataagcgtgtggatacttggtacatggatatgcacatgtggcttttatttggtttccctatgcatgttcaggaaaacatgtcacataaaagcaggtaaaggtattttggaagaaagagagtggggatctatggaaaatgatagggagggaagagcagaaaacaaaaaagaacatttctaagtctggcagaggacgaagacaggcctggaactggaagcacctgcacttacatttcttgagtgctttctggtttgccaagcactttcccaagcttccatttgaacctccagattggaaatggggggctgcctgatgttctttttattccttcaaccccagtgcaggcccctcactctaaggtgaggacatctgggcatccacagccactgactcctgtccaagctgcctgctcagggggccctgggtatggggcctggaaagggcctgtgagaagagtctcctccaggttcccctggcagctcccaatcccctcaccatggcaacctccaagatggtgctgaagaccccagcgagagcccccactgctgttcagaaaacctgaaaagaatagaatatagactatggtggacatttgcactaaatatgcttacttagcaattctgcgcctgaggaatgtcaaccttgtgtttttccatgccttcctatgagtgtctttcacttttcatcactcttccttcaattttccctcagttagtgttctctttagaagtgatgtttttcaagctgccttcagataaatttctggctctcttcttggacttttcttctggaaaggaggcaggattgggatttgggcctgctagtaggatgcaaagagatataacctattgtgcccatggtcacagagcttaattaattgtcaaggagacaagagtaagatacctgggacagttggacaatagaccaaattcatggaccagtggtagagaaagtgttcaaatagaagtcctttgggtattcagtctaggcatggttagctgggtttgggacagacagagaagtctccaaggaaatgggctctaccttgacccgtagttgtgatgcacgtcaatagtgagcaggtgggggcatttcaagtgaagataaaatgaccagacacactactcaatctttctgcagatcttggcagatccttagaaggtgataggaataaaacctagaggtctggcttgaaagcttgggtcaagactgatcaaaaagttagctttgtcaaaagcatcaggctcattcttacctacagacaacccatggtgatcctaagtcattaatccacccagaggcctgtcctaacctgagtttccttgctttgaagtgtgctgtcctctgcaacatgaggaaataatttgctgcctgcttcagtgaaccatcaggagagccagcagacctaatgacatgtgagaatattaacctcctaccatgaagagctgtgaatcttgagcggcagtctataattcaccctggactcttaagccaggcctctccagctttttctctcactcactttctcacttacacccagagagagaaggagagacctgctcataaaactttatattctccaatagtgtgagccttgctgagctgtttagtaatgagtgactttccttttgcagtcatggaaaaatgtatacctacagaggcaggagcagggggaagatattttttcaatgttgcgctttgcatacgctttttcctatgcagaaaggaaaagtgtcctcctgacactggaaaaaatgcatgatattatggaaggtgaccatttcagtgcttgaataaccaaacttctttgtaattctgtactttatgttaaaagtcaaagaaaagtggaggtgaggatactaatcttaagatatttggatattagaagagatcttagagaccttttaaggtcacttggaagcagaagaagcactgaaatctcattaacagtggtcgtctgtttatgcccttgtttcacgagatttggggcttttggaggacaggattgtactcctagtgcctggcagagtgtctaatccataggaggcctcaaattaaagttagtcaaaagatggagccagtcacctgctctaaccccacattttgcatacggaagaaacaaaggtccaccagtgattgactcatgggcacagctagagtttttcttaggcctcaacggcagctcttttcttccatctgcctgtctaattgctgctcttggccttatgatgttttcacaagcaacgtgttattctaatggagactatcttgatcttgtcaattgagtgaaggcaaacacaaatgtagggccaaggcaccatatcagggagtaaatacagaagtgggcaattagcctcagggcccagagtgcaaggatgtgcagatctggctgcctggcagagagcacctagcatggtaggagtccttagaccagaataatcttccttactttgctaggaaagccttccccaccaggcctcactgctccaccagctccatgtgggctgggaggaaacctattttattcatcctaggcctggctaggggatgctcaataaatatttgctgtagggggaataaataaatgaatgaaggatccagtctgtgattgttagggtacctttctattcaaccaggctgtttaatttccgtatctcaagcatctctgtctggacaatggacaatgctgggcacctataaactttttgatgacttatagaggtaataaaatcaaactttcttcttctgcttacttgactagtgcgatgaattaaccaatggttaatgtctactctcggtatatgtaattctcagcctttctgatctcttcaaattactgtcttcttccttctgccatcttctttttttttttttaagaattaattttattaaaaccagtcaaattaaagctgcctctgtccagggcatctcaagatccatccattatggcttcttatcttggcaggcgatcggcttggaaaggcagctcagccattatgcacatacaaagcccatcacttcacaaccaatggtcaattcatcaaacatttatcttttgccctctgagcgtgtgacgctttgcctctcatttcctagtttgggttgctctgaaagatgaagaaaagcaggcgggagttcttttctcccctaactttccccttcccccagatcgtttttattaatcagatttcatacttgaggcttgaaacatgccctgctctctttttttggccatctgagggttagggatagtctgccagtctcatgctgaactttttactgaatggtggaacaattaaggcaatgataaaactttgcgagttttcatcttgcaacccactttggtgcatgggatgtttaaaaatgaagagacctccaaaataatctagcctagccgccttagtttacaaaacagtacagtgaggcccacaggaggcaagggtttgactgaaatactgcagcaaggtgctaaccaaggcaggacctggatcaggttccttggttgttcctaagacagaggctctcccgagctgtcatctccccatgcattcaaatgattctgaaacatatcactatttcttctggaggtttagccactgacctgcttcattttctgaggcaactaatttcttcctttgaaaagaaaatatgcacatttatttttcaaaaacaatctttcagctaaacaacaattggtctaggtttgtcttcatgtactgtatctcagctgatccccattctgatatctgcaaattggacaggtcagggattttctgccaccttgaaagattagaaagctacattttccaagtgttatttttccaaagtcttagctcacaaaaccaggacttgaaaacagagctcatgactcaatggagtggtcttatgctgtgtgtttaccaactagatttgcgtttggcctcattgagttgacaagatattcctcatcagaacaacacattccctatgaaaacaccacactggcttcctgctgccatgagcagcagtcagataaccagagaggcagacacagaggaaatagccttggttcagtgctgggaaaaactctttttctctatgctgcacaactggaaacagttgatctcgtctctgtccctaacattgttaggtgctagtacacagggcccaggacatgccatgagaggatctggaaagcaaagctcaccaaattattctttgagaggttttgtgaaccatagagctagagctattctggaagaaagaaaatggctccggtagcaagccacttttggaggtcaccatatctcctggggccttctttcctgctggagacataaagctatcttgtagtctgggacagaaaacgtgttttcacctttttcagccaattaagacctcacagaatcaacagttggcacgtttttactggctttcctggcctgagtccattccaggggggccctgcccgtggggagctggtctttgggcaagtatttgattaggggcccttggggtccctggggctttgagatccagccgtgtaaatgtctccttttctggttggcttgcaatgagtagacaccatctgttgaattaaaaattccctttatggagggtggtgaaaggcttgtgtagaagagacactgttatctttcaagcaaacagttcatgaggttgaagagcagcgttcttggcccaacatatgtttgcccaatggctgtgggcgcctcccccaccaggctctgcattccgccccatggcgaggtgcacgcataccatggctgcggtacaccgtgtccactctcacatctccctagcaaagaaaacccccatttatagaacccgccaaacaaactcactctttagactcttaaaaacaaacaagatcccgaggccacaggctccatgcgtgcatgtgtggttttgtaaaatctcaagccgtgaatcaaaataatttcagagacatagtcaaagcccaggccaaaccctgtcaccagggtgggaaaaagacaggaaagattcgctttgaggagggaggatagcccagagaaggagaatgatgggagcaaaacatggaggctgtccttcatctagtatgttcctggagagacacctgctccttgtctctgtccttagggacttgctataataccttcaggacaagcataggagggatgggccaaaaacagaaagggcttactacagccctcattgctttcctctcaacttccagagctcatcttatccatgctgcttactgatacgctgtcctgtatggtgtccccttattccaagcccagcgtctctgtctccttcatagatggtaagagcattgagagcagattccatgacttgtgcatcatttgtatccccagatgcatgtgctcactgaattcctgtcatgttggaaatggataccacaccacatgctttttggtagcaaatcagctttctggactgtagcttacttgagtgccaggatcaagttatctcttttccttatgttccctcaccaccaaatgtggaataaggtatcagcagatgctcaaaagattagaattcatttgcattgagacttagctcaagcccatctccttcaccagccccagccccttctcagagtagcactaatcatcccaatctattaccctgcattatctggtaactgcttccctgtctatacctactacttaatagtaggggactattgcacagtcatccttgtagctccagagactagcaaagtactaagcacagagttggcactcaatacatttttataaatgaatgaatgaacaagctatagaggtgtaccccaaggggatcattagcagataaatctcaagccagtcccacctaatgcatacttaacttcaaaggaaaaaaaaaatctaagaactagctctttgggagattcttctaggagcatccatggagtacagagtgaaaggaaaaagaactcgaaaaccatttaggttcatcattatattaataattgaggacgtacaatgaatgggttacaaagctacacacagtgtttggataaaggatgtggcgatggtgaatttccatttctggaccacagctagaaagtatgtagaggtagtttaacatagttggggagcactgcactttatgtacacaggttctaaatgtggcctggtgactcatgtgtgttttcaggtaggccactttacctctctggacattagtcatcttctgtgaagtagggggagagtggaacagcctaaaattcctctaggattcaaagtctatgagtctataagaagactataatagggcatattttacacaaatagagctgtagctctaatatgtagtttactttctataagaggtcagggtgcaaacatgtgcctttttattatgggcacatgttacacccttcccatagttaggaaaatattaaagaagccttgcacagtcccagctagaagaatgaggcatagagtttagtgtgctggaactctgctaccctcttcctaccagactgactcttaagggaccctttggcaaagcagaactgacttaacagcccttataaactatagttataaaggaaggagctccagtcagataaccatagtatctggatagaatattagaagccatcgaatctgatctctatgaagaaattccctctaaacattctccatgattttagcctctgttcaaataagtatagtggctctgagggcagctcatcctttagtgaacagcttctccattttgacaagtttcaaaaaattgattcaagacatttcctcccagcttacataattttctatttgtttttgattctgcattctggaaccctgtaggctgaggactttgaaatgactaagacttctctgctcctggttaagcaactttaggactgtctcaatcactgtttcttacacccttcacctcctggtggttgtccttggatggtgtttctgaatgcaaatccacctttgaatctggcacctggaattcaaacaaagctccaggcacaggcacttaggggccaggagagtagtagagtggattgggatcagatttgcttctgtggtggtcactggcgattcatactaagtcctcttcccagacactgctctttttctaaagcttctacatgttatgtatgtggaattgtcttgttttatttaaaaggaatattaactgtggtttttcctgattataaaatgtatattcatgatagaaaatttagtagctagagaaaactatttgaaaatgactgataaactccttacctgggggttaacggtatgtatctgggagatatagataggtatcacacacatacacacacacacataaatatatacatttaagtgtgtttgtgtatgtgtgtacagaattgttataatgtctctgtgtacaagattgtatattaacagcagtttataaactagaacaactaagaaagatgactttgatgattcttaaccattaacatggaagaaaatgcccagaaaagcttggtgcagattaaaatttgtgtggaaaatggtgaggaccatatggatgacttttaattttcatgcatgagatctttgtgtgtgtactatattacattgtgacttaatttggggtacttaaatgtatagcatgaaaattgtactggctcattagatagctgcctacaatattatttttaattcctgtgtaatattttatgatacagatatattgagctttatttaatcattcttcaatccttgggcatttaggcttgtttgcaatgttattgtaaatgctatagtgaacatacttgtacataaacttatacacatctttgatatttactgaataaattattggaattggaattagtggatgcaaaggtaattatttttaagtcttttaatataaattgccatccagcaatttcactgtctcattagtcttgtgtttgtttgaagtaaaagcttgacaaaactatgttaaaatctaagaaaaggatataaatatttttattagaatattctagattcctaataaagctgaaaatttctcccatatttttattattgacaaatttccttgtgaattttccatccaaggtttttggtcatttttctgttagggcttcaggttttccttaatgatttataaaagctctttccatgttaagggtgttaaatcttagactgttagaagggttgcaaatatattcccaattttcatattccttttaattttttcgagtaaatatttttggatagttgaactttattatttagtttacattagacactgtgaaatttcatcttattgagctgaaaaatggttgattctaacaggatcattttggatcctactgtatctttcttaatatctctttagggtcctgtcccctataaatgtgataaacatctccttaaccaagccactggcaaaaaacaaaaacaacaaaaaacaaaaaaataagatcaaaatccctagaatctacccatagagcaatttgagccattaatcagtattcttcaggtacatttttgaagcagttatgactctacttctacctaagattgtcattttctagcctactttttggcttcctgtcacaaagatattatgagaagcttattcaaagccttttttttttttttttttgagccgagtctcactctgtcgccaggctgaagtacagtggcatgatctcagctcactgcaacctccacctcccaggttcaagcgattctcctgcctcagcctcccgagtagctgggactacaggcacgtgccaccacgcccagctaatttttgtatttttagtagagacgaggtttcaccatgttggccaggatggtcttgatctcttgacctcatgatccaccctccttggcctcccaaagtgctgggattacaggcatgagccatcatgcctggccaaccattttgaactctgaatacaatatatatcttctttattcctacatgagtatctccattaacaactggtctctcaaaacttttccttaatgcacagaatctgcctgtttgagaatctgtattacattttattgatatatatcctacctcattctatgaaaggtttgggctagcttattagaatgaataaaattaaaaagcagtatataaataaatgaaataccaaggctatgaaaaaattataagccttgacaatgaagttagaaagcaggtatggatatcatgaaggattacctttttacaattgggtcacaatttacctctgagcttcctggtagcaaaagtaaaaaagataacatgatcagatacattattcacgttgtcctacagcaagaaaatacaggttcctgagagctatcatctgaccagaatttcatatgggtaattatataacctcatgtatccaaaataggagaatctaccttcttacctcctttttcaagtaacattaactccaagggcttctagctccttattctccattactaattctttaggcatcatatttgaaagttttcttagtattcttagatatggtgcagggggcttcagacctagttaactattaatactttagctttttggctggtcttggattcaggtctctcagatgagtgttgaattttactgtctgcagttcagggattagccatcatgttggggtctcaatagagctttggggttgactttgaccccaaagtcatgtaaccactacttcttttttgttgttattgtttagcaatgaggtctcgctctgttgcccaggctggagtgcagtgacatgactgtagctcactgtagcctggccctcctgggctcaagcgattctcttgcctcagcctcctgaatagctgggactacaggctcacaccatcatgccaggctactttttgtgttttagaaatggcgtcttactatgtcgcccaggctagatgcagttccttgtgatgtcagtgtacactctgtctcacataccctagccagaacctttttcatgttcttctatttcttaaagacatttctattcatcttgatacacttacagtatggattagttgatttatataattatttgtgtgtgtgtgtgtgtatatatatgtatggctatgtgacttgaatggcagaaaaatacacacagccaactctacatactgtatatagtaatatacaacatgtataatatgtatagtaatatataacatgtataatatatgtcgtaatatatagagttacgtatctatgtctgtctttatccatacatttaaggatataaaaaagagttttatggaaaaaagaatatctcttacaggactaggtaaacaaattataaaaatgtataggtataaaaatgtcacccataatcccagcactttgggaggctgaggggggcggattatgaggtcaagagattgagaccatcctggccaacatggtgaaaccctgtctctactaaaaatacaaaaattagctgggcgtggtggcggaagcctgtagtcccagctactcaggaggcggaggcaggagaatcacttgaacctgggaggcggaggttgcagtgagctgcgattgtgccactgcactccagcctgatgacagagtgagactccatcttaaaaaaattaaaaatgactgtgctgccactggaccatttagtgggagatgagtggtcacatcatacctcaccaattctctcttttctcccttcattttccaccaggtggcttttggtcacctgtcctgtccttgtggcttttgccatgcctttgtgggaagttgatatacagacatttcccaaggagctgccgtgtgccaggcactgcagttggagtggtggggggagtataggagaggaacaagttactatttctgctctcaaggtaatgttgaaacaatttaacaactgcactgtccaattagaattgatgctggctggagcagggtctatggtagccctgggctgtagtgggcattggcctcctagtttctggattatgaagaggtctgggggtgccaaggaatggccagggtagcaggaagggcactcagagctgcaattatttacctactgaaggaagtatttaaatattttaataatgagaactggtatacccatgcagacttgctgaatgttactctttcctgatcttagccacatggccccagggaaaccatgaggaggcattctggcctctgaaagaatacgagtctagaggctgccctccttgccactggccagtgtgctggtcctgctgtctgtcccatgcttggatttattggccgtttttttcttagacactcccaggttttggctgaacagtgctcagtggatgaggcagtaccgagccctcactgtacacttaacagctttctaggagtatggaggctgcatggagatcccctcttagaggggcctgggcagacagaaatcatcagagagatccatacagaacaggcagcagccagcccttgcaggtctgggggcctagccagggtagtagacatcagacccaggttaggccctttagaacttccatggccacaccattttctcaattaaaaatatgggcagggatatttagagtcgaggaagtaggtaaagatctttgtggagatcttgctttcttgattggtttgagaacatcccagcctttgctcctggatttggggccaaatatagtcccaaagagacagatgcttttgttttagggtctgtggtcagctattccccatgttcgctgcccatctcatgttggtgcagctctgtcacccctggtataggctggagctgagggaggagagatcgaattcttagcacagcctagatccaaggattgatccaggggttctggaagtatcctctggtggtttttatggtacaatgttctggctggtttttggctgggcaaggggcagggaggaatggctacaaattagaggctcctgcccaaggctgccagccctacctgggcccgggccctggctcttcccctccattctggtgagtggctcatttgcagggaaaggatgaaggtcactgatttgtgcccacccaggagcagaagggactgggcctcaaggggcggcccttctgtggggcccctggccccctacccatggcccccccatgccagccactggcctggcctgggcagggctgcacgcctgttcggcgctgctgttttcataagctaatgagggcagagtgtgagccacaggcgatgatgttgggatattaactctgacaggaagcttgatcataattatcttaacgaggatagggttaattacagtggaaacttaaaagttctctccgtttgaatccactggagcccaatgcgttgtgatgttttgtcattttgatgtgactttggaaaaggcactgggatgctcccagcagccgctgcagctcctgggggagcccaggcagagccctgggaacgagggaaggaggtaagaggatggtacctgtgtgtgagatcctggctgcgttgctgctggtggagggggaggcaggcagcctgcagggagttccaggggtgctgattaggtttccagaacaatccaggcctggatgatctccctccagctggctgtgcctaggtcctgggtgaaccttgctctctcctatcagcccccagcccatacctcagacatcgcactactccaggaagctggtgagtgatgctggactgacagttggcgtctccaccggggatctggttttggggtgcattttgctgtccatacacaaggtgatagcagacaaattgtcattttatttaacagcacatatttgcaggcacctggcatataggggaatgaactcaaagatctacacacatattttttctcctattcctccctagaaaacagcagtaaaaataacagtaaaaaaaaaataaataaagggtaaagccacctcattctaggtgtatgtgtattgtcgtccacgtgtcagctgggacccccaaaacctatcttccccagtactcccatttactatgctctctgccccctgacttctgtgccccagccctcagctctggatctagatgattaaatccccaggagcacaccacactgataacatgaaaacaaggatttattcattagcaatcacccatgtaatatggttctctttttactgagcagctaataacgtcacatagcaaaaagagtctcaaaaccagacaggtgacaggggatttgagactgatcttaccagctcttctgggaagtctcactctggcgtggatttctgccccatagcccaccctgaggggaagaaaggctggctggatggaggtgggcgcttccttggtgctcctgggctctccccatcttcatgctgtgtcgttttgctttatgcctccctggagcactcttggaaaggagctttcttctgcttgccagttgccaaccatttgctgattctcatcagaagaatctaatatttgcataacgtaactcaggaacaatgtgtatttggatgctgcctttgagcggagtccaactgatgtttgtgcacaaaggaattattaaccacccgtaaggctccctaaggggaagtggcctcacctcccctagtggtaaacgggcccagtcctgagaagccttttggcacatcactccctaacccctagtggaggaagggacttcagaagagcccgaaagtcccctgcacaagcctgacttgctgcacgcctcctctgtgggtttgttcatgggcccgtcccctgcattccaaacacacccccagggtcagggcgtctggaaacaaaacagtgaataaaaggaggaaggaaaagaaaaaaaaaacagcgtatgctagtaaccagttagccgtccttcacttattctcgacaagatcctatgagctggaaggaacacagaacaggagagttcagatgggctattgacaggcccaaattcacacaacaggaaatagaggagcggaggcaaagtcccaaaccttcctgcctagatgtgcgtacattgtgggtttttaaattttttttttgtttgtattttttgtgggtacataagaggtgtagatatttatgggtcacatgacatattttgatacaggcaggcaatgtgtaatcatcacatcaggataaatgggatatccagcccttcaagcatttatcctcacaagttgtgttttgcctctcggaaccaagaggaaaaagagaaaggaggaggaaatgaaacacgatgacctctggacccctactccaaaatgtgtcccccctcggtggggctggcagtgttggttggaggagcaggcgtgctctgggagtcgagtcctgagtgggaccaccccgaggtctggcaggaatggaacatgccggcagagctctgggcccagtggtatctacagatttaattacttacaacacatttttatacctcgtaagtattgactccctattttggagtcctcttggcagcgatcccacaagggagctatggatgccttgggaaagatctggtgctgaagttcacactcacagcagatgtgcagacattgcacacgcaagcacacggggctgtaatggaagcactatcagtaaatgaataaatagtgtggacgacatctccctgatttgtcacattttatagaatagcccggcatcccctacgtgtctccctcccgtccacatcgtagctcagctgtcagccggtgcaggctcagcacatctcctgggtctggcaggtgaacgagctgggagtctgtgtctctgtgtaagcccctctgccggccggcttgctttaattaatgtctgtgtgcgcccaggcaagcacttgtgcacaactacctcgtgtcacctccacccccaacactcatgagagcccataaaattaagagttaactttcagcgatgtgtataagcaaggctatttttccctttctgctgtttttttttttttttcctggagccgggtacttaattctttctgttgcctttttatttactgcctcaacatctacagggttgcactctacacttctttcaaaaattaagtgagaaatccactttccataaattaaaacagtaacttcaggccaggagctttgaagcagcaattctcccaacccccgtctccccacccgcagcaaaaacaaataaaaagaaataataaaagaaaaagccctctcagatcggagtgattatgtaattctgcagatgccttgcctttggggcagccactgggacgctgggcagaagcaaattaagtgattagtaaagaaaaaaggcagaggaaaaaaaaaagtcaaaggatgtgaacggagagaaaggaagccttccctgtcgtttcccccgcgactgtacagagaactgctaagaaatgatacttgaagttatatttattattgtaagagggtatgatatttctgggcaggaatgatggatgacaacttgaatttgtgtccagggaatgaaggtgaactgtgacagagttatttatcttgggaatggaggttagggtcagccgaggctgggtgcctgaaggcacaagacattgacaaatttatcctgcaggccgtatctgaagccctttgttttggatcctggctactcactaagtgaccctcatccttcatgttggcaatgcgtgaaggatgcggtgggtgccagcggccccttctcccccgccgcccccgccccgactcctgctactaattcttgtcattcactttgctgacaggcaccaagcccaaactattcccagtcctgaaagggaaggttaaaatatttatttcggctcataatggcctccctgatttagtgcaggatcatttttcctgttgcctttgtcattgcaggtcactggaaggactgagcgcattcaggagcctggaggaactcatcttggacaacaatcagctgggggacgaccttgtgttgccagggttacccagactgcataccttaaccctcaacaagaaccgaatatcctttcctctgcccgctgcccccactccccacccagccccacagtcgtcccccaaccccaccctgcacaaatacctgcaaaatgtcaaatgagttttacgtgtcagctaaattaaagtatgtgaaatacagttcgtgggcagacaaagcattctgtcttctggcactcgggacacttcagagtaatttattataggtcattcataaatgaaacgcaccattatatcttcctgttgctccattttagtgtagagatctaagttatggctgtgaagaaatctttttaatagataaaaatagagaaagaaaataatgtcaccgctgcagaggcagcgaagcccagtctgtttgcttgggcttgtgtgggagggcgacctctggtgggaagtcccgggtaatgccgccaagcaaacttcctctcctgggaggtttctggaaggctctggggcaggcttggggaaccgttttggtgagggaaaggagctaaggtggcagagacatgtgaagcccaggcctggctatgccctcactgggggataccatgctctggtgatgagaggcctaggggacccacgacagtgtatggcctcctctatggaggcaaggacctagtcagcctagggtgagacttacgggcactaactgctctggattctgtagtggggatggaaacagggaacccttgctgcaacctaaggcccgtagctcctgcattgttagtgtagtggattacccggcactagaatgccagctcgatgggacagggagtttccttggttttgttaactcctctgttcttcacactaagaatagtgcctggcaccaagtacaagctcaataaatatttgagggatgaatgcatcattatcattagctattccttattgagcactcctaggaatgaggcatggtgctgggttctttatgtgtgttgttattcatccttaccaagccctgtgagaagggtgtgtcttttccatttacctagacatagaaagaggtgaggtgtaggcacacagccagacactagcaagatgctaggtcctggatgattcagtgtcaactgtgttgtgtccaaagtccaatgtctgcattctactgtgttgcttcagactcagtggtccaatggctttgttttattggatggaacatttgagacctggagtagttaaaccacttgttcacattcatacaataagttagaaatagaaaaggagacaaggcattttcctctagagtataaaataaaatcagatatacatgtaaggcttggcacatatgcatatgccagcatttaagaatgatttgcagaagtatttgttagctactgtttatacttcaagccataagttaatgttttctttattctctcagatattgtctcagtcagctcttgctgctacagcacagtaccgtacatgaggtggcttaaacaacaaacatttatttctcacagtctggaggctggaggtttgagatcaggatgccagcagggttggtttcttggtgaagatactttctcactgtatcatcacatagcagagagagaggaagcaagctttttcaagtctctccttataggggcactgatcccatcagagagatctacccttatgacctaatcacctcccaaaggcctcatctccacataccatcattttggggattagaatttcaacatatgaatttgagggaagaacaaacattcagaccatagtattataaatatgctccttgtggtcattattgtcactttgatagaagtagaaggggagggcctacatgtaaattcacagtctttgtcataatgaaattttggtggaattttcccttcttatgtctgttagtcaaccaagtttcccaatcactctttgaaaaactttgtagtcttatggctttctaggctgtcttagatgatcagttggccaatattctcaaataaatcaaggacagaaggatttttagacatgtcctgtgtcccaggtctccgtagaatattagggtccatggactttggttcatgtctcagcttaatcatatttagcggtgtgaccttggacaagttatcttctgtgagcttctttttctcatttttaaagaaatatgttggactggtcgatggttttattcacagtattgctgtcaccagagataagcaggcctcttggcttcagagtgctgagaggttttctttgtctttggttgagtcctttccctattctgtgcctccacttttccaatctgtagcagtaatgctaagggagtaatggtaatggcctaggagggaccgaagcagaagacactgtgtggctgtaaacctgaccagtgatatcactggtgctgttgtagcacattttcttatcagtgaatattctgaatagacttctttccttttttctcctctgctctactaatgtgattgtgaagatcatcttccccatctacttgactcagaagtcacagagaaaggtaggtaaaatcaggcaataacagcacatgctatcttctcaacccagcacttctgatgccactttttcagctaaatgactctcctacctaactgtgagaatgttgcaggctttccaacaatttctaggttccatattgttattgccaccccatgaaatgctttagatatggcctctatacattagcttttgctgcataataatccaccccaacatttagtggcttaaaacaacaaatatttacaattctatagatcagatgtttggccagggctcagcaggatggttcttctgctagtcttattctgggtcagtcatgcagccacatctacctggaggctcaactggggctggatggtctaagatgacctcactcatatgtctggaggttggtactgggtgttggctaaactacctgtctcttaacaggctagcataagacacttcacatgggaggagtattctaacagcacaagccccatagtacaagtagtcttcaagttcaacttatatcatgtgttaatgtcccatgaccaaagcaagtcacataccaactgtagaacaaatatgggaagggactgcacagggtgtatgtataaagaagcataattcatttctgtaacaatctacccaggagaccttggcattggcatcttgtctccttcagattttactttatatttgtgataaagggagccctagaaacaagtaactattggcctcctaaaaaagtattagctcttttgtgtaaattgaatctttaaacaagttaggaagcttgctgccaaatgaggttttatcttgaatccttttgtgaagttagctttattttaaatttttttggtttgtattttggcatatgtaaaatggttattcaccccacctaccatgtaaaatctagatttttccactttggtttgactcaaagttaaatgtgtctataataatgctgtaggttcctagaccctggacacttgggtcattggcttctttaatcctttagcaagagggattatcacatagtggttaagaacaacaggctctgaaggcagacttcctgagcttctaccctaaacctgccacttttctgcatgaccttgggcaagtgatttaacatctctatgttttggtttcctttgaaaatgcagacaatgctagtacccatcccataggttgttttgaagattattctaagtatctcagacatattagattctagtaacatagtaagtgctatgtaagggttactattattgttgttgttattatcctagagaattgtgtaaactcatctggtttgacttgggccacattgtaaccaaggccagagtacagatatacttctgagtttagaatggttctttgacttgcataatttaatattgccctaatggcattccgtgagttgggtactgttggtgaataattactctcatttttatggaaaaactaggagtggatgagctctctgaagtcacatagattgtcagtagtggggcttagtctagaacccaggtatgctgattcccagctccagactctgaaacccaaaggagcggcaatcattgtacaaggagaggagccaagatacaggaggagtcagcatcctgagcctgcctctgcaaggtcctgctcccagctggggctgctgggagtctgctcttaaaagggattccagagcccagaaccagcatctggaaaatttcttctgtgttcatcagtcaatgcctccctgccatctgcatacctcctgctggacctcccatctttttccaccagccctttttctcattgtgttcagccctcgtgttgatatcctgctctggtatatctgaaagcctggttgtctgagattacctcatctcttggttcgtagggatctcattttctttctttgtttcattgagactggccaggtagtcactggctatggacttgaaccccttccccactgctcacactctttctctctctctctctctcacacccaaccacgagcatgcacacgccatccccaactcttccaccaggaggggtgggatatttggtaatggtctcagccatatcatgtctgaataatcaaccccaagtaaggttgaccacctgaaaattcaggaaagtgtagataacctttgcgcaatcaaatgattctcccccactttccttttggggtgtgtggggggcacataagcagattttatttggaatcacacttcatcttctgtctccctatttgcttcagcacatgtactgaatagccaatgagtttggattatagtgccagcacgaagaaagaatggtgctacatgttacacagctgggctgtggcacggagaccactccagcgagtcagaggtgggactggagttcccatagccatttgctgtgtcatcttaggaacgatttgctgtgtcatcttaggaaagtctctgtaccttgtcaggggcctcagtttctttataaaatggttaacacaaacttcagcatattgttgagaggtttaaatggtataatatgtaggaaatcactttgttaaagactttacaatttcttggcatattttactgttagccaatgcctcgatgcgtcaaaagaagtagcccaaattggaaggaaggatctgaggtacagcacatagcccggtgatggcacctgtgctgtcacacagaaacatgtaagaaccctcatgttccagtgttttaaattttgcttttgtgttaggaaattataagtcactttttcctctagaaatgcagtttctttaagatctgggtttaaatccagactctatcatgtactagctgtgtgaccgttaacccgtttccttaattgttatttcagcatgataaatttctgacatatgtgaataaaaatgaggtatgtcattatgctgtatatttagtattcaaaaacccagtattaggattagctgtggttaaaatcatcccagtggttatggaggttgccctttaacccgcagctgagcccagagggagggatgtgtccattctcacctgggacagctttggacccgcacaactggacacaggctaggaggcttccctcctccctcatgctccaaactttcaaggcaagatgctgctttgatcttgggccctctgcagaaaatctcctttggcaagcctccccatgacagctgggctctgcaatggcaactttctgcagacaacactgaaaaaaaatctcaacgctaagtaccccggagaagacttgataagggaaaccaggtgtgtgccgggaacccagctggagagagttgaaactgtgccaggtagctacacatttttaaaaaaggtacccttaggagaatccctgaaatgatccccactgcagtggtcttgattagccagggacaccaggtttcttccacagattgcctgtggtcaattttctatgcatcttgacaaaaaagaaatgtgagaagttctatgttggatctcaaaaccagccaacataaggctgtgtttgtccttgctgacccaggagacaaagaaaccaattaaaacttctcatgttttatcctctggtggtgctatcagcataaaggcgaaggactggtctagagcatgcatgcagggaggaggtgctagtgcttcctgcctggtgtggatttgggggagaccacctgactcagccaaaagtatcatttatagtaggtagttgaaaggcttaggaagatggagcttctgccatacaaaatacccaaaagcaggcaggctcttagaaatctctttgattcattggcaaaggatggctgaagcttcttggaacctgcagaccccttgcccaggaaagtcccatgatcagagcattcaaatgatccacttctttgtggccagggacagatccaggtttggggagtgtgaaacctctgtaatttgagggagccctcttaaatactatataatcaggaatgcaaaattaggtatgaaatgaatgtttatttggaatagaactgtatcaaaggaaattttaaaattttaagttgataaatttcacaaatgtcaaaatacctagaaaagtatcaatctttattgaagatatgcctctagagaaacttttttcctgcaaatttctcatagtttcattatttggtgaaattttgtaatttttttctagagagaatagataattccctcttttagcatggttgatcgaaaattgattttttaaaatagtttagaaatgtttctttcagtttcaccatttgttattggtagtttcaccactaaattattggtaaaacttttaggattattacattttggagaaactcttacacatttctttcatatatgataggagctgtataagatttcaggacattttggccgggcacagtggctcacacctgtaatcccagaactttgggaggccgaggcaggtggatctcctgagattaggagttcgagacgaacccaggaggcagaggttgcagtgagccgagatcacgccattgcactccagcctgggcgacagagtgagactctgtctcaaaaaaaaagatttcaggacattttaagttgtgtgtgtgttgatgtgtaggcatgtatacatacacttaacaactgaatcttaaatgttctttgaattgatgaatgagtttgttaatcattttgccatcagttttatgttggtccctgcatatttgtgttaatatggtggatagtaagagtattactggaagccattcctactgatactgttggaagaatttaactagacacagaagtgactgcaaattatacaaatattcccccactgaatcataattaaatgttactcctacacaatgtacccttaggtggggattcccatagacattcccattgttactcagctgaagggaaaatgtggtagaagtcctagtggagcgagacagtgatctccacagattatagtgtaaattacctactttttcaaattaaaaaaaaaaaaaatcacatgatcatgtgactctattaccagggtctttcccagggccttggaaggggcctatgcaaacaagaaacccttgacgcatgagctttattagctccatggtagatctacaagtgaaggttcactcaacttaatctaggcctacttccccgaacatggtggccagctaggcttccttcactcgtcattaaatgttgagaaatgactggcatttcaatccaactcagtttcccaatatttcctcaacttaaaagccttgccagtttggggttccattcctgcatatccccaccttcatacagcagacagaaaaaagagccaagctttgaggaatgtttcctaagaggaaagtaggttttggtccgggctttccatctgcagtagagagggcttccctcagtcgtgtagggcccttgtctacgtaaataattagaatcactccaagtcagtatgtcagcaccattctggtagcccactttcttgcagtcccacaaaagaaatactgtgctggccagaagcagtagtcagcttgtctggctgtccttcctggaacaagggcctggccttgaggttttaagacagcctgatccagacatgagttctagtgctccttggagcatctgatgggtcgcatgggtgggctagaaagttggagcaaaccatgaaggggagaaaccaagcctgggactgaggcccgtgcaggtccgggtctaggtccaggcctggggtactctacctgaatgacaccatccagtcctgggtattggaaggggacttaggacattctgaggaaggtacttgaaagcacagggcacctgaggtgtctgtgcccatatctaagggcaatactagcaatgagacttttttctttgtttttttttttttttttcttttgttgttgtagtaatgactgtgaagtatttaaagatagaaactgctagaaaagctgaacttaccctggaattgttcactgtcattttaattggctctatttaaataattttcctgaagagtatgatgattgaactttagtaagtgtattttgtctccagggattttgattcctggccacccacccctctgtactcccaacctcatccccctggtgtgggaccttctctccagtctctatatgaactcccattctcacctcctcattctagtgttcctgtatggccatctctggatgttatttgtgaaagatttgagagattgaaaacaaacttccatgtctatttctctgtctttgtttgggaagcagggaggatgttggtgaattgaagccaacagcaaatgagtgtgctcacaactttcttttgctagtttcccctcttgctagtttccctctcttgctagtttcccctctcttgttagtttccccctcttgcttgtttccccttctcttgctactttcccctcccttgctagtttttcccctctcttgctagtttccccctctcttgctagtttaccttctcttgctagtttttcccctcctttgttagtttccccctctcttgctagtttacctattcttgctagtttttcccctcccttgctagtttccccctctcttgctactttaccctgtcttgctagtttcgccctctggttagtttccctctcttgctagtttcgccctctggttagtttccctctcttgctagtttccccctctggttagtttccctctcttgctagtttccccctctctggttagtttccctctcttgccagtttccccctctcttgctagtttccccctcttgttagtttcctcctcttgctagtttctccctctggttagtttccttctcttgctagtttccccctctcttgttagtttcccctctcttggtagtttccccctctggttagtttcctcctcttgctagtttccccctcttttgctagtttccctctcttgctagtttcacctcttctgcttgtactctgcttctcattgtctctggctgctctcacctagggtatagcatttggccttgcatatgatggtggcagagcatgtgtacaaagaatgcttgaaggaacttagtttggagaataaaagatttaaggaagacatgtgagcttcaaatatctgaagcttcatcatgtggaagagaagaagccttattctttgtgaccccaagcagttaaattgggtcactgagtagaggttagagaaagattcaattccaggggaaaggaaaactgttatggttgtcagaaatggaatgtgctatgtcgtggtgattgcttggcaaatattttagggacccaattccgacattggttggattttgaattcattcttttgtgacaagttgaaatgaagtatgaggaaatctgtgtaacagcccaaggttagataacatcctcacagagcaagaacatcccttttctttgattttaccttctcctaggttcaagtggaccccacttctgggaactgtaatctgagtctttcacgcttgcatatggcatttcttctacccttgtatgttttgttcctgtagctctgctgccattccctggctgggacccccttttatctgccaacttggttaaccctctctcatatgtctctcgaagtcacggcctaaccaggcatgcctatctaaccatcaccttacctaggctcagcttgtctgtatgtggcttaagccaggagttagtatggggactaagttgtcattaaaccctttccagtacctgtgattctgtgaatctatggctcttgctttatttggtttggccatgattggacagtgggtcccactggaagatggctcctggaataatctcccccatcatgcccccctctgacttttctctttcattctctaattccctcactaacagagaaagaatatattttaatgaggccttctgaaataatttctggttttctttttctggtttttttgttttgtttttttcttttgagacagagtctcgctctgtcacctgggggcatgatctctactcactgcaacctccacctcccaggttcaagcgattctcctgcctcagcttcccaagtagctgggattacaggctcctgccatcatgcccagctaatttttgtatttttagtagagacgggtttcaccatgttggccaggctggtctcaaactcctgacctcaaatgatctgcctaccagggcctcccaacgtactggaattacaggtgtgggccaccatgcccagcccttgttttcattactagaaacgaattaagttttatggttttgcatattgtaaaaatattttactctatggaatcttcccttttggtgtgttttagaaacagaactatagaggaaagaaaaatatgatgggacaatcaagtttattcattcttcctcagatgatctggacttagtcttacctgcctagcgaaagttgggctgtgttcccaacagtgggagtgaaaaagtagcaataccgtatacccacagctgaattgatttcagcccccaccctgaggtctcacaggagcagactggactcatcagcgcctgtcagtcatggcctatgctcattgctaagccttttgtcttactggaccaagattcttaacctttgtcacatcactgatttggagaacctgctggatcacttggcagaagtgacaccagctctggagtacctcagtctgctgggcaacgtggcctgtcccaacgagctggtcagcttggaaaaggatgaggaagactacaagagatacaggtgagtgtccaggggttggaccatggtgggaaaagggaaaaagagaaactttaggggatgatattatactctggggtgcatagtagatgtttggtacatatcagtgggtttcccatgacaatgttaaacttttaccttttggtaacctatagccattgtctctcttggttgaggtcacaaaagctaagaaagatgaaaagttattgccttttctactttttttgtgaagtgccagatattaagtattttaggttttccaagttacatggacttgtcacaactactcagccctgctttcataatgcagaagtagtcatacataatttgtgaacaaatgggcatggctttgttccagtaaagctttatttacaaaacagatggcaggccagatttcacccatgggctgtaacttgctgacccctgctctgtgttgtaagatctttctgtggtctgtctcagagtcatcttgaagagagagatgacttcccaccaaaatttagggagctcatagacaatctcaagaggaagtcccacaggcccatacctctccaccatagagctatgccgtggcgcccaccagccatgcgctttgatgggctccaagtagaaatgcttttcgttcttctctctacttctcaaccatgtgctttaaaagccctgatccaaagtcatttagagagtctttttggtcttacccattttaccaaagtcacctaattttccttcttcatttaaaattgtctgtgttctcattgttgattgttgttttgtaaatgctttaatgaccttttcatggacctctctctccattatgacataagctctcattaaacaccccacctgaatcactcttaaaaataacttaataaattttgtatatgtatatatgcatatatacatatatgtctgtgtctatatgtatatgtatgtgtacacacacattcatgcacttgttcatttattcattcattcatggggccaagaagctatgtgtgaagccaaccatgtaggcaagtttttgtaatttttttctagaatgagagaggtagggagggattggtctcaagtacagggcttatgaggttgcaaaaggaaaagaagagctaagaaaaatttttttctattctttttttggtgtatcatcagctctcaaataattactatttgttttttctattgtaactggtcgcattagcaaaagtactaagaccaaggtatgtggggtcagatcagaagatctgatgtggagtccggctttcccagtggggcttttaaaataggaggacagtctatatcagtattccataatcaaggatctacctctgagtcatccaaggtattctgatgcagttggtggcaattacaacacaacagtccataggtgtttctgatgtccagttggctttagaattcggagacactcagctcccaacaagttcaatttcttcctttactgtctcacaccattttatagatcctatcttgtgtattttttctcacttcttcatgtatttccacatctagagaatggcttccagtgggtaggagctgagttgtcttgactcttgaagcctcatcaatgcctaaagtagtgctggatatgaaaaaagggcttggcacctttttttttctggaggtggcttgaaaccacctttccttctcaggaactaggaacttatagggagatgcagggatctttggccatctcagatgcccactgcccatttggaatcagatccatttggatgtcaacaaatgcagctaataagcaaaggactatgattcagactcaatccaagtgctggttgtgggtcatgaatctttagggagggctggattctacaagtgtggtctatctcatgggctagcctgggcaccctccaagcccatcctccccactccagttctgttcccttggaaggagttgaggggtggggctagggaggtggtttgtgagtacacatatgacaaagttgccatgagaggctagattctagaggtcatacaaaaccaaaatcataactagtcaaaattaacttagaaaatttacatcatccacaatgatggcaagatgcttgcactctgagagaatcagggactaggaacagcacaaggaacagtaaatatgttcccatgtagttacacattcactgcacagcaactggttgaagagtggaatggtaggctgattctctagcacatttaaattttttattcatttaatctctttattttttactgttggtttgatgagtgctcacacttgtatatggaaaagatagatatgtgcttgatatagttccattctatggtctgtaagcagatccgctttgtccttcctcgagtttgtgctccatttgccactgagaaattttagggttttgcaatatgacttttgattctggagttcctgtggcatttgtgtttatacaaaacaatgcagctgccttttttttcttttggtaaaacattttcctggcccttcatccacaaaacacgaggtttgccttccttctagctgtttcccagagcctaatagtagagcctctatgtaaatttatgtgacgttttcactagaaaattgcttaaaaatgaatgctatttctagagtttactgtttttcactttaagtacattttctgacaatatgtcttctattaatcatttaagcaatactaggagccttaaaggagtgtattcagaagcaagaacccatggttcatttagtgctgtctgaaaaaaattcttattgattggcatcctctgtggttatgtgatgtaatatttataatatgtcacccaggcatacatcaaaacaagtgtgtctgttgtttcatttccatgggagatgttgatttcaaagaggtcagcccagtttttaggtcacattgtggccaaccactggaccagaaatgggaagtgactcgatttatgtagttattggaaatggcatcacagagcttgagtttctgtggagtctttcctcccctcctcccaaattcacccttttcacttcctcacttaccccctgtgcacccagttggattttcttggcacacatccccaccataaaacaggctcattaaatttatatgtgagcatgaacatacaaccaagttgttgagtagcaccctggccccactggggcaggagcagaactgtgcctggggtttctctttgccattcatcatagttcatggctgagaaatgtccatggccctgttattataggagcttaaacctgtctgtgattttcagtgtgtacacaccatgctgctattttgggatgaatgtggaatggaggtgaatgtgataatcagcagcctccaggatttgggcaggaagagaacagcagtgcaagacttggccggagagaccaccatgctactgagaaaccactttagtgccccttgtggatttcaacgctagccaaaataacaaatcaatatgggaaagttgggtgcccagaatggtctatttcttgtcttcccttgccattgctttttttgtttttgctacagaaagaacaatggacttgaaggttaacagtagacaagtctggacttcacctttcaaataagggagttggtctcatggtcttttagctcttcctctgtcactgaaccctctgtcgttcatcccctcctgccactccagtctctggttggccttgctttactccctcctccctgtagggccttctgtattccttacaactttcaattatttaaaacgtgacaccctttctttgttcccctgcatggagcagccctggggcctgcccagtgtctgcagcactcagccaaagggaaggagggagggaccctccgccgtctggtcgctctgggctgccaccatttcccagacgaataggagctgtaaaacttgtggcttacataacccagtgagcattctccagctaatctacaatctgggctttgaagatcacaagaaagcaaaggtcacgacccagagatcaaagtgacagaagcccacagagtaattgccggttactctctgtagagggccttggtctgtcctgtgggtgtattgtttgcacagagacttcaaacatgctgccggtgaactgtgaggaaaatcagctggcctctgccagttgtcaggcattcatgaatgctgtaggtgagctcacctcggctcattagagtgagattgttgtcatctctctgagcatctgcagttattccactcacactgtttgttcattactctgtggtctttattgactttctcacagtcgtcatttacttggaggtgttgggggtggttatataaggaaattggaataacaagaaaggacgacatggacatttttattgtaagtcaactttgagccacgtagagttcaagcaaggtaacatttgaaagaggcttagacatcatttggcccatccccttcacagcatagatagaaaaactgaggctcagaaaggcagcagagactgaaccaagatcacagggcaagatacactcaagagtctggcctctttcactatgctattagtccccaagctttttgttacaaaaacttgccctccttttatttttctccccaacactttaaaaactttgatctctcaaataggctgcactgaagccattgctaagtttattattattatgaaacatatacgttcagcagttgatcacggcttctgttcagcatgaggtaaccagtgctattaaatggagttaatgtaatctagtcaacagtgaggaagcatgatgttttgttgacggactcatctatcccatcaagctttgtgaaagattgagaatggctcacagatcacccactgctgccttcaggggtctcaggtagcgcatcagtagcttgtaccatgtctcactgcctccaaagaatagaagcaagaaggcagcaagaaataatgcaaagaagcatagactgccgtaaacggaagaaaattttaaaaacgaaacaaaactctaatgaccccatgcccagttccctcaagaattggaaacttggtacttcttgaatagagtgtcagagaaaaaaacatgtcagccaaccccattcgcagaccgtggaggcccatctgagcttttctgtggttgtaaggtgttcctggggagcagccattgccctggggggagcagccattgccctggggataacagttacaggcagggggaaagaacatcctcctctctctctcaggtctggatgaaaaatgcctgagtgttgggactagagcagagaaaattgattttggaaagaaagaaaaaaaaggtatttctcctgttccttttctcctcctagcggttttagctctctccttagaggagtcctttaagcaaatggaacattctatgtgagaagaaagaggacctgaaaagctcaatgtgctggtctctcagatttaggaaatctgtttccagacagagacaaatgggtctttaagcaccttcccaggatccctgctctcctcttgataaccccaccttctgtatctcagccaagagcacctctgactctcacccccacccctcaccacccccagccttgggggctttcccctagccaccttgagaaggtcaggaaaattggagttgccctctggagctagggacgtgagacttagaacttagaccgatctcttttcattaagcagtgccctggcttaacaagcagttttataaatctgaagctgtctccgggtgtcgcaggatttatagacgggggtttctgccataaagtggtttatgatggctgccttctgtgttattagtagctgtctcttccttcaaccattgctgtttgataatagccttaaaacacccagaattacttacctgcaaaccctattcccgatagcccctgttgacagtctgaataagtttagtgcccttttgttgtactttaccttcaaaacaaactgattgaaccatcaatagctcgtggaagctgacagagggatgtcatctggactagcccttgtgattgcaggttatctgggggagttaaccttcccgcattgttaactgaaatgttttatgtactatgcaactttaggatacggctgtgataaccccagtaactaagtaatacatcacagtaaagagattttggtgcaacaaataacccaggattaaatttacaagggttgaattgatattgtaaaagccttcattctgtggctttgggaatcctctcttgtatttttatggcaaacttgtattacactcaggattgaagctgtgccttttgacaccctgacatgacctagaacaaagggaaatagatctcccaggaccatgaaaggacaggcaagcaggaagcccactgacttatcacttggcaataatgtttggagcgagttccaagccaccaaggggcaagaagatctggcagacatggccactggctgggttctgtgcactgcaggcattggggcagggcagcccttagcagaactggaaggagaccctttgctgcctcaccaccctcctaatttcaaagctattattcctcatggtgttattttcacgaggacattggttctcagcaggactagcagcatcagcatcacctggggacatattagaaatgtaaatttcaggcccagttccagaaatactgaatcagaaactctggggatggggccctgccatctgtgtgttgggaagtctccaggaaatactgatgcccactgaagtttgagaaccactgtgcaagaatagaagctcactgaaagagcacagatcttctgcattgcttttatctcctcatgttggtacttgactcaggtcctgacacacagtagctgttccataattattgttgaacgagtgaatgtatgagtaagtaaatgaaagaagacatctctatggaggaactttggaccctgggctgaatctcagatggaactatttggggcaagtcctcctagtgtccctcacacctctccaagcagcaaccacttggaaacccaggctggcccacgggatgggtgaaaatcatccctcatttcagggggtgactggcagcctgtgtcatgggctgtctcttcgattgtataagaagagtgatctgaaaacagcagctctttgtcatctaaaatttttaactagcttaaaagccagcacctctgtctctctctttctcctttgatttcagggctgtgatccaaagtgaggcaaaatgacaatgtgcggtctgttgtcatcatggttcctgccagccccgtgaaggcatccttcactccatcgttaaacattggctgattttctaatactgatgttttcttcacctgaatattcatcttttcccaccctacacttagtgggtgtctttactccctgcacgtcactcctgacatattgtttctgtctgtacatgtctttatttgaaagagtctgttgtcataaagacttttctgctacaagcagaagacggaagttttctctgacattgactgaggccggtgggagctctactggaggatagaaaagatatttggtggtggttcatgcctgtaattccagcagatggatcacttgaggtcaggagtttgagtccagcctggccaacatggtgaaacgctgtctctactaaaaatacaaaaataagccaggagtagtggcacacacatgtagtcccagctacttgggaggctgagacaggggaattgcttgaacctgggaggcagaggttgcagtgagcagagatcatgccactgctctccaacctgggcaacagagcaagactccatctcaaaaaaaaaaaaaaaaaaaaaaaaaaaaaaagaaaaagaaaagaaagaaacaaagaaaggaaagatatttgggtgttttgtggcactttcttgattttgggtgaggttagcaggtatttggagggaaggcagaacccagggtaggaaaaggacaatagactgaggccagggaggaaacaggaagtagccagagtcaaatttccaggacaccaggcatggggtggacatttctgaaggaagaaaagaatttcataatattttgactttaacaatgagtcctgtgaaggttattcctgcagacctctaaactattctctctggctttgggatggtcagccaagccttttacctggataagcatatgcaggccacttggtgataatgtcaccgaatccttgggttgttacttcctcagttgggaacctctgtgactggtggttcctttgcctgagttttgcttgggcctgctgagcttgttccacctactcggcctggtgggctgcacttggctcgtgctgccagttcagatcccatgcctgccaagggtgagccaggtgtggagtggtaaggggtacatgagcaagcaagcacagggtctggccactgcatacagccaggcatgctggaagcagcaggctgggcagctctagacactggcatgggcactagctccctgtgaggctgcatctggaccaggcataccacaaccagcttccactgcaggcactggggaacgtggtggcacctggaagcttgaagatgccaggaaccacagagccccaaagagggtgtcacagcctttgcttggggagctgttaggtctgggctccccaaagggccacagctcttctctctgtctcatcacccaccatgtggcgagtggggggacatgtttcagccctgtttgtgttacagctctttcagtcctgccatttggtgggtcccaagttgttgtcccagatccaggaagaatgaagcatgcacacaattggagggtgagcaaggcaaagaggtgctttattaagcaacagtacagctctcaggacaactaaagtgggtagctcctttctgcaggcaggtcatctcagtttctgtgcagccctcagcagagaggagacccagagtgggtagctcctctccacaggcaggttgttccatcaactgcccaagtctggctgagtctggggcttttatgggcatcagaggaaaggaagtgcatgctgattggtccatgggtggccacagcagggtccagaaaaagtaccatatgttctcactctgatttacgaaactggtagcccagcccctatgctttaggccacctctggcctgatggtggggtttcaccggggacacacccctttccacctaggagcctgtctgcctcctgctgccagccatcaacctgctgtctatagtgcccatggtgcccaggctgtttgtgccaagggatgcctgcaggcccatgctgagctgtcctctgctgtcccttggcctccctgctgtgctcatcagcacccaaagtccagaaggggctgaggtggcagggggctggtgtttcagtactgctccgagcatgtacacactcagccagattgtgacagtgcctgggcttggccgccactttgctccaaaattggagtgggcattgggagtcgggagaggccaggcagtgggagcaggcactcccaagccttccagtggaggggggcttcccaagcccccaagagcacagggatgcctgggtctgcagctgcagctgggcagctgcagttgcacctgggagcaggggctcctgccccaccaactcaggagggcatggggctcccacctgttcctggctcctgccagctccatagagcaagcagcccctactgcagctggtgtatttgcagcaattgctccagatgggctgctactgccaccaataatgagaccaccttacgaatgtggaaggtggccttgggaacccaaggctccagtgaaggcaagccacactgttccaagtaacatcctcactgaggaatagctaggttcttggggttgccttaaggtgtggttccttgatgcccatttgagatttcctgtttctccttttccattgagttttcagtcagtagacctcttgctctgtgctcccataaccactctatgcataacctcgattttggcacttagctatgcttattcctaatttctccatgtgagtgtataatttctgttacactgagaacacctttgagagcaggaagcatgttgtaatcacatctgtatccctaaggcctggcacatagtaggtgatcaagaaatatctgtgcaactgaaatcaactggtatgttattgactccattctaatgccagttttcaagatgtggtgagagtgagcaaataaatttgtccctgccttcaagaagcttacagtttgggtaaggacattaatgaacaccaagaaaataattagaaaacaacaaaatgttagactgtaaggtgctgatggcatattctaggagtcctgggaagggagaaagcaatgaagggtggaggtgtacaaaaaaaccttcacaggagatgaggcttgaaagatgagtatatgctgaggaggctgggtataggaaggaaatgacagattcccttggagataatccattgctcttgacactgtgtacttacctcttgataagcagaatagggtggaaacaactcgcttgtttgattgttggactatggaacttgatggaaagcatcttggttagtgattgtccctgacgagggagaagtatagacacatgtccatacctgttatacatttatttatgcatttatataactataccctggccaagtggttattcttgtcaactccatatatacctatttgaggacagttaattacactagcagccattggcttatttctggagtccatctgccaaggaattcttccagggaaatggagagcacctagcatttgttgggccattaatatctcctagaaattaactcccccttttctccttgataatcttcataggttagcaagtgtggaaataaccacatgtattatcgagggatgatgcgaacaaagttcttaagacccctgcctgattcctcaaggaagcatttctcagctacatgtgttcctcacttgtaacccacagtcatccaggtcattatagtctatgatacagatgacccataggaatggcagtgacgtaaagggtacaatcaatttataggtttattttactgagaatttctgtgtagcaaagaagctgagcctgttttctagactggaaggaagggcatgcgttgatagggtgccactggctaacccacgtgtgtgtgtgtgtgtttacctttgagccaagtgtaccattagtgtgtgcttctaatgtttagttgtgcatgtgtgtaagatagaatcattctgacttctccaaggaacagttgtttattctttgtgaaagaagagaggaggcgcagccaaggtctaagttccagaagaccggatggtgtggattcttgaagatcagacaagctgtcgggatctctgaggctgccactcaaacttcctgagttgtctctgactcttatcttccagatgctttgttctgtacaagctgcccaacttgaaatttctggatgcccagaaagtaaccagacaagaacgagaggaggcgttggtcagaggagtcttcatgaaggtggtgaagcccaaggtgagctgcctacttgctgttcttcacaagggatttacatctcatggcagtgcttacaccccagggcatgcagaatgtcctctgagtgtttagaatgcagttggaatctcacatgaagggtccttccatggatacattgttggccaaacatgaaatagggttaggtgtaaattggatcttcctgttttaccaataaagcagcactatgcatagcccaatggtgaagttctgtgggggactgcaggtctccttcttggaaatattcactaagtggggcctctgcaggtttgcagctgagaaaggagaaagaggaaagcattgggcatgggtgggctttggggtaggggggattcttctagtacttcagagggggactttcttgtttgccaccaaagggaagctagggaagagtgattttcttccatcacaggcaagggctccacggccctctgagatatcgttagtgtggaaggtgatgttttctgacagtgtgtccctaggctggcatgtgccccccacatgtatctctccagagctgattagagtggtgtttactgacctttcctttaccagctgagtctgtaagtgaatttggtgtcatgctaatggcagctctgatgaggcagtggagaattggcttggggtcttggattcagacacaaggagattttttaaggacatggatgactatctctttgggaggagttgggagtccttcagtgaagccagaggctggggaatggactcggtgacccctgatgatctccttggagaaccatcattgccttgaggctctgtggagctgtgtggtcacctcccatgagattgcaacttgtgtgttgaaaatgctggcactgatatcctagaagtctagtttatcctcagctattgacttatagcactctgcatgtgcattggaaatgattaaaggggggaaagaaaaaacaaaaacaaaacagaacaatgaaacatcttccatcaagttgctctgctggcagcagacctcaggccactttctttccctgaatccatgaggtgcaacttattttccattatgctgaataaaattgctagcagttgtggaaatatgtgatatggagggtatattactggcagataaatgtattgttacctctttcagcatgtgggaaattaattgagtgattcatttcatagctattaaagtgttaacagtgctccctatcgaggcacaggtttgatgtattgcacacaactgcctttagttattctagcttttgtaatttttccaaatgaaataatttatttcttggccttctttttatttgtttttggtgaaaacagtccagagatagccagcatgaccaaacccagcaaaagtacaacaaatgcactctataatatcctgggttattataaataacctgcccaccctacatatctcaccttcttgtatacatctgtattcacgtgtatacctgtgtgcagagtggatcagtatttctcctgcgctcattgactttgatgtgggcagctctacattgtcacacaaaatctgaaggggtaataaatgtagtacccaccatatctggatggggcactcagtgcatgcccaccccccattcttctaaggttcttggtgcacagatctacaagtgttcacatcatcctctaaagtagaaggaaggggtcactggctcgctttatgggtgagggaactgagggctggagaagttaactgggctgccccaggtcacctggctagtaattgtggagctggaggtttaccttgtgtctgaccactgggcccacactcttctctctctgctttctcacccctggagcagtgagctacatatttaccctgtggatctctttgttcaaacaaaacctcctaaggtctaaatgaggaaaacaggtaagagcaggactgttctgttgagtagaggtgggaggaatcgaaatccttccttgcttttgaaagtatctgagactggctccttaaaatccagcattagttgtttctgagtcattagcaacatcagcagaaatgccctttagggttcccaattagtttctaatcaattctagaattagttcatgtttgtatgattgactccaatatccttactaactgtattaagctttaaaaagcctgttaaggtgtaaattagttcaaccattgtggaaagcagtatggcaattcctcagagagctaaaaacagaactaccatttgacctagcaatcctattactgggtatatactgaaaggaatataaatcattctatcataaagacacatacatgtggatattcccagcaacactattcacaatagcaaagacatggaatcagcctaaatgcccatcagtgacagatcagataaagaaaatgtgatacgtatacactatggaatactatgcagccatacaaaagaacgagatcatatcttttgtgggaacatggatggagctggaggccattattcttagcaaactaatgcaggaacagaaaaacaaatacatattcttacttacaggtagaagctaaatgatgagaactcatgaacacaaagaagggaacaacagacataggggcctacttgaggctgaagattgggaggagagagaggagcagaaaaaataactattaggtactaggcttggtacctgggtatgaaataatctctacaacaaacccccgtgacacaagtttacctatgtaaccaacctgcatatttacccccaaacctaaaacaaaagtttaaaaaaatacctgttaattatttgaggagagagactaaagtactcttacaaagtatggtgatcttggttctctttctgtagtcacatgatttccagaccaaagaggacttagaaatcacctagtctgtgctcccgtttcatggatgagggagctgggagagggtgtagtttcctgaggctccatggaattgggaccagaacccctgggggtctgggcttccagttaagtgttcaatttatgccatgattcttcaagtgcccaggacgattcttctgtgttcttggtttcatatcgaactggatgcctacattgaatggcaggcagttcccttttgtctgttattttcagagataggcagtggtacttttcttgtagaaagaaagacgccaaatgagctccttgctgaattaataaattggcattaaaaaggctggttctcacctgttcacggtgtgtacagacatatgtttgttcccatgcaggtgtgtatacccgcttccgtctctgtgtatatatacatatgcatgttctgggaggtatgtgtacaccagagtcagcttctaagtggcaagcaatttcctttccatgtgttgctgctgctgtgctgagcacactcagggaagacctatttttcacgatggaatcggaatctcaagctggctcctgtcctttccagggcagccaaggcctgttgtgcttattcagcagaatgctctgatggatgattaaggtggccgtgatttggggagctattttcattttattcctgacataaagaatttgggagaatggaaaatgtccctccaatcacagctcttgccttggaggtagggaaacgggcagtctgggtgttctcggctgacacaaatgcagaaccatccaggaggtaataaaggcccgatgtcgcagaggtctgattgggtacctggcaggcgctggcgcttgagtgcaagtcctcactccctttctcccatgatgacacatttctcctccgtggctgccttttagcttttgttgtttcaaagctggcttctgtctgagctctgattgttgtagagaaagatgctgtcattcattaggaagtgatagctgaatgctacaatggatgcttccagactttatctctctgtgtgtgtgtgtgtgtgtgtgtgtgtgtgtgtgtgtgtgttattagttgatggacctgcaacagctaggctttgtcatttccaaaattcaaatatataaaatatatataactttatcaaatattggccattgaatcatgccattgttaatacagagaacaccacactggatacagagaaggttcaagcccccaaagaaagagcccgctagtaaccaaactgtgaagcccctcactgcactgggaaacatagatcaaaggggtgcagaggcctgtccaggatgacgtgtgtggtcggcatgtcagccctgcacagcagagagacagctcaaaaatccgacagtcagaattgtttaattatgtcctgactttgtaattattcatccctgttctggcaaagagcacagttgtcatttctttgacataattatttaaagctgagccctcttgtttacaggcatgtatacaaagttggctaccaactgtttaatcttcagaatcttaaaggagcctaaggagggcaactctagaaagtgttttgacgcttatgttttgcttgcattaatatccatcctcatagggaagatgtggtaataaatatgtctgtgagtagtgaggtgtctttgaagacatgtcacttgtttgtttatgtgggcacagtgtgttcaaacgtatgttttttcccatgcaggtgtgtataccagcttcaatctctctgtgtgtatacatatgcatgttctgggaggtatgtgtacaccagagtcagcttctaagtggcgagcgatttcctttcctgatttttccacctgattttcccatcgtgtagtttgtgtatttgtgtagtttgttgtagcttgtatatttgtgtgtgtgcctacgttttgatacttgggagggtgggctattgtgtatgtgtgtgtgtgcatgtgtgtttgtgtgtgatagaaagaaggaaggagagggagggagatgccctgtgttgaagaaataaactttggagtacatgcatttccaaaagtctctcttattcttttcccctaaactgaaaattggaaactatttgggcctgagaatcacctgctcccacaaataccctacatagtcctgccattgactcttggagttaggtcctcactcccctgggtacctttagtttcttccatctgtgtctgtgtttttaggtttccatgcaaaaggccatctaggatgaagacggaatgattcataaggaagctggcttctcattgggatgaggaagctgctcgcccctggggtgccagctccatgagggcaggaaccttgtgttttgttcgtttctgtatctctagtacctagtctatagcagaggctcagtcaatactcatcaaaggaatgaaccatgaacagcagagcatattggaagatccatcatgaaaaggttgttgtatgtgttctaattacttcagtcaacatggttacattaaaaggcaggaaagaaaccattgcctttagactgtgtgttaattgccacctgtacactggcagaaaagacagattctgggcatcgtatttgtttttccaaaggattttcctgggattatttatgatgggaaaacctactactaccacaatccccatgacttggcttttccactgggtagcatttcacggggaggcaagggtgtgatctgaagctgcgttctcctcgtcactcggggtggtactggagtcctccttctttctcaacccacctgctcatattagggcttttaggaagtaagtagctcttctcatgaaacatgttagggtacccacaagtctgtgtgtagttacaatgaaattttccgtcttcgccgctattgtattttttgtctatacctaaaggagcactacctagttgcttctttgctacacttaattgttttttatgcctagtgtagcactttactaagtgctatcttattctaaactacactgcgtatgtctttgatatcttctgttactcctatgtagcccaattgcaaatgcataaaagggtatcagaaactacttctaggtttattacaattactgtcctttatactcaatattttcaagaatatatattttatataaagccaggacatgcctataaataaacattataaatcacaagtacattcagttcaacagaccatcagccaatatattttgaaagttctccacagtgccaaacattcaaaaaataatttaaaatattggttgtttttctggatgtttccaactacctgaatgtgctcatgtttttatgatttttttttctgttttcatgcagatgtttcttgtctagagacatattcagattctattttcagtttctttctagtaaattttggagagaggaaaattttttaattaactgttttttttaagaaaatgcttagatggtgtgttcaaaaacaactctgggagccaaacatttgcagtttgtttgttttttcaaccttattcctgacttcacagtttgcacgttcatttgagggagaatcacttaaagattttgtatttctccatttttagaaccatggcatcctgtgcctcaagcaaatgcttttggagtattgctctttggaggcggcctctgtagccttgcatttgggtagcaaccctctaaaataaaaaaatagagcactgcaggaaagccatgtctctggtgtgctggtgaaaccaaaatacacaatagaaagaaggaaggtggtagcagcctcttaggggcattcccaggagtcctaggggccttgccaggtgctgagcacatagtagagactactgtccatgaagccagtgcctgggggatgttactgtttccctgatgggacctctggcttgcccagctccccaatggcccagcttcaccctcttcctctttttagcctcccacatgctcgctgctgtccaaagatgcttagatggatgtatcaagaggatcatggaagtaagtagcattttttaagtgttggggataagatgagtaactcttggatactttgtcctgcctctgcaacccaacaactgggagaagtgtggtagattgcattgtttgtctaaaaccattcctttctctctgcccttgctgtggctccccatctaagggaggaatacacttccccattccattgactttggccttggccatgtaactccttgaccaatgggatgcgagtggaagtgacagcatgacaattctgggccaaggccttacacagcaccatgtgttttcactcactgctcgcacacgtctgccatttgctatgaaaacaacatgagagacaccatgaccagacctgaacctgacttgaggcctgcaaacatcccagccaaccacagacctctacatgagaaagaaatgcttgtaataagccactaagattttgagcagtagtgtgctgactaatacctaggcaggccatcccatccacacaccctacctctgctgcatctctggccattgaaccagggtcttaactggaacacaacttggagttttgtgaggttagtggcagtcattggtgccacagcaccaactactgtagggtttctgggtacttaactaattaggatagcagggccagtctagaggtcaactggctgcctagtggtacattagatgcacagaaacttccctgatatgtgagttagaagaacatgcattaagtagtcactgtctgctagctattgtaccagctgcttaacaattttatctctaattttctccctacaaatgaggaaactgatgatcagataaattatatacataacctaaaattacagagcaaggtggaaccaggtcctttttttcccccgggtcttcctaagccccaaaactcatgttctttcccctctatgccttgaattacttcagggaaaaaagtcacactcaaagcttgtgctcttcccactgtatcccttacatttcattaacaaggcatacatttctgatggaaggcaggggtgaaagagcaggaagatcaggagatagaaggcagccagaggcaactttgtaatttccaattttaaccctgtgatgactccccataacatattttggtgaaatacatgggctaggcaaagaactacaggagccaggctgtggggggatctctgagttaggtcaggtttgcagtttcccctgagggtgaggaggaaccttggcagagtttgaagtgggaaaaaagtctgggcaggcctgtatttgcatccctgggtatctgggagagggagccttagagctctgtgcagagcaggtgctttggtgatgtggaaatctgtgcaacagcaggcactggtctgaggctgccacagtgttcccagcacccaggccagtgtcagtgctcaggcagctacaggggttagagagctgtgtctaaagaagctctgggatagcagagatgggtccatgtaagagtgagtagctctgattctgggacaaggagacagctgatggctgtcagagacccactagtgactcccccttaaagggagttcacaacatctcgaaaatgttctttgacatgttcttacctcaaagcccctgtcccttatagtattcactgtctcgttttaaggagtaaatttaagtcttcctaactgggccataaaaagttgtcattcgcatgatcactggcaatgactaagatggagcctttatttgtctttagtctgcacattatcagcttgacattttcttgatccactttggaaaagtatctttggcattttgtttgtgcaatgtagattctttttatcattatttttattaagtttgaaaggaaagagaagagggaaaaggagaggaaaataaagatgtttacttaagaaattgggttctggagagtaaagttagggttctgatttaaagttatccatatttaaaaccaacattacccggggttctgtgcagagctacagggcaggactggctgctgttcttcagctatgggtgcatgggtgagcttgacaaatccttcccatgcttttgtccatcctccagcccacccctcccaattctttgctttgagcttggtgattctaggctagtgatgaagaagaataagttggaaatgcaggggcaacttgtctaggaacagggaaaaaaggccaatgactgacgtatgagtaaaaggagaatcatgatggcctcggcatcccctcccctccattagaccagggccttgctgtctttcctgaactctacagcttaatagagctctgtcttcctcagaaagacccttctgggcccatggaaacatcagactgtaggattctagagactgaactctcaggccattgtgtatccttgaaggcagggaaacctgcaagaagggggcaggcagaggccaaccacacagatgccaggccactagagaaacatcatgaacattgttctgaagctgccttcaatgacatgtgcatgtatttgcaattccatggctaaggaagaaggagaaaacagggatggcatggtcccattttctactctgcagttctggctatttccaaaccacctgctactataggtaatagcagataagaagagcaaattgtaagaagaaaatataaaagaaaactcatgtaagctcagtgatgaaatgaatgtttctgatacttaacatttacctgatctttttgttgttcccaaaagcaaagttgtggagaagataaagtagtaagataatcttagggcagcagtcaccaacgtttctggcaccagggactagttttttggaagacaattattccacagactgggggtggggatgggggatgatttctggatgaaactgctccacctcagatcatcaggcattagattctcataaggagcctacaacctagatccctcacatgcacagttcacaatagggtttgaactcctatgagaatctgatgccaccactgatctgacaggaggcagagcccaggcagtaatgctcgctcaccagccgctcacctcctgctgtgtggccttgtatctaatagaccacagaccagtacatgtctgtagccccgggattggtgttggagacccctgccttagggtgtccaacctgaacagagttaaaagtcttcacaacatttggaagaaaaatgtgatgatggtctgaatgcggctgatatgtactttcagggtaccctttggaggagtgtcaaacaggtatgcctaggcaagtaccagcatgcagtagcacgcaagtaatggcaccccgttccaccaccctgcagactcagtgaggggccagatgctcacaagagaggggcttctcatttcaaaagaaattatctctgccctttatcccaaatggtccattgagaagcaaagagaacatctttctttcctgtttccccagagagcctgtttctcctcaccaacacctctagaacatccaagttcccagacagctgttggatccggcttgagagtctgctacaaccctctgggaggtgtgtttttgcctagaagttgttttgcccacctgtggtcaccatagcttccttctggggcctgtatacacactcagattccaaatgcatcttctttgtcactctgaccagcagaagtgccatttcacaagcatgatggggaaggcttgtccttggggtcactgaaggctggtgctacaattagcccttctgtttgcttttctgctccttacagtagagtgtcttagatgaacagacagggctccatcaataatgcacagatgctctgtaattgggacttcctttgatgttaatttagctaagttcaacgccattgtcagtgatagcaattacgtgcagccttttcaccaaggacattttaggataattttatttttcatgtgcattttaaaatatggcagtaaattttgagctacattacctgaattagaactcattatttattttcaacagtgaactaatactctgtctaggctccaaagctgtcttttttttttttttcttttttgaagtgggggatatgtactggggcttctactttatgcagtttttaactcttgagtgaaatttagaagtgagtcacctcttctttttttgttgagcattttgaattgtcacagaggctatctggctcggtgacctgtcacgtatttttgttgggcccatttttattcactcctcccccattccacagcctttacttttgttcttgacacaatttaaggagttgcctccagctgtttttctggggaggttttaagtctgaatttattgtagctgttgagttccatggaaaacctgcaattcttaatttgttcatgagctgttgttggatttgctgctccatttggggactgggcccactccaagtttcagggtaatgtttaggtttggattaaaggctggacttctacctcctgttattggttgccttattaaaatggggaatgtaatgccttccaagtctgttgggggattaaatgagataatctgtggcaggagctaatgcaggctctggtctaaagcatcagtagcagctagtgttcttagtcatgtaatttcaacttacaaggactctttttgtggcactgctgtgtcatcaagatgtgtgggtgaatgtgaggaaggtaattttggcttgagatgctggggggcaggtacctaagtcagcttgggataccataacaaaatgccattgactagatgtcttaaacaacagaaatgcattttcttgcagttctgaagtccagaagttcaaggtcagggtgccagcatggttgggttcaggtgtgggctctcttcctggcttgtagatggctaccttctcactgcactctccactcatggtggagaaagtaaagaaagagaaggagatctctccgtcttctgatgaaaccacagtcctattggattagggtctcatttaaccttaattacctcctaaagatattgtctccaggtagagtcccattgcagggtagagcttgaacgtgtgaatttgggggtacgcattcagtccacagcagggggcattgcccctctatttctggtggcttaactaagttttctggaatttatccttaaatgaaatacttctgctcttctgagacatctacttcctagtaagagtaaaatacctaaaagaaaggaatgtgagaggggaaagaaggcctcacattcatcctggggaggtccaggctcctgagcttgggcatctcctcagccaccgcacgagacccttttgttcttgtgggaatggtagagggaagcagtagggcaggtgaaggcatgggaggagtaagcatggcgtgggggacgggaggctccttgccactgatggagccaggagcatgaaggtgcagctgccctctggacagctgtggaggagagaggtctccatacaggaccaatgcgggaaaggatgcctggtgcagaagtgagcccttaagctctttcatttgagtgacctcgcactcaactctcttaatcctcctctaattcccttggcgaatctggaaatgaaggctgatgtttagatcctagaatttgtcattggaatcaggcccctctgcccccagagtgaaatgaaaaaactggggaatgaaatttgggagcttgttacacatgtccaaagaatattatcccatcatcagaagggttttgaaacccaagattgagatattggctctttagacaattagaaaacagccaagtactgtattatgaaacaaacaaacaaaaaaatctgttcagtttaatgctagaaaaagagaaagagaggttctaacttctgtactcattctaatttttagtcatgggatgttttggagaagattagattacaaaatatttttttcttctttgtgttcagaaaagcctcaataccaacttgcagcctctacacttttagatgccagaggcctaagctgaaaatatgaattgtgtttgcttaggtaaaaatgaacagggcgagtaagcggaataaagaataaaaagcttttccttctttgctttccctcccctcttcctttgcacattatatgactaaatgtgcaactttgttcacataactgctacaaacagttcactgtgtaggccaaacgctctcttatgcagtaaaattaagaaataatatgctttgaaagtgatttatgagtgtggttaaactgccagatttacaaagaaatagttcagatcttgggaagcctcaggagtcacgtcaaaaatgaatttgaccatgatttaaactgctacttttcttacatgacatttaatatgtgtactttggaggcccatatgtctttaataaaatagcattaagttttaaatatgatatgaatgcagccagtttctaaattcataaccttttccacaactccaaaatgctaaccaataagggagtcatacacgcaataaaacataaaccttagaaaatagctttttattaaaatggttagacagttggcagctgggttgcaatgtaataaatacttacagcattgtgggtttatcagacgttgtttaccctgcaagcaactgggaccagacaactaattatagcccctgccacaagagcagttcaagctgagtccccctgagtatatcgaagatgcaggatagtttgtgttgagggccctggacagggagtccagagatttgggctctaatccctctccaccacttaaaggggtgtgaccttgggcaagtccctccatttttccaacttctccaatctgtgtcacagagataataatgcctggcaggcagttctgcagtgctgatagataagaaacatctgacaccagtgcttggcacatagtaggtgctcagtaaagagaaacaattctttttaaaaacagcctttaattaaaaaaaaaagtattttaggctagaccttcatgtcattctagcagtgatgttttatgatgactctaggttggccccaagagaagtttaaccacttagccagagatcagtgtaaacatcatgaaaaatgaacatggagctccttgtctctctcacctcttgaaggaacaagcatgggagaatggcagaaggacatatttggttcagggggaatgggagtgtcctggtggccactgctactttcctgttcccagagatgaaagggaggtgtgcaacactgttccttcttgcctttggctttcccattcatagtgaaggtgacttatctttgtaaactgctctttatcacagcctaaggtctttgagtacttctgctgctgctgtgtgtgaatgcatctgcagacctttctgtggagtagtcttgaagtaggccttccagtctccatgtttccagatgcataggaacagctggtgtttccagcatcgcagatgaaacagccagtctggcagtggtctgattgtgtttgtccatgcaaccaaatcttaccaccccccacaaacctccttagcagggaattcctgaattccctaaaatggaagttgtacattatatttgagcctagattttgaatctcagggcacagacatatgtgtggttatcaaagatgaaaagaccaaggaaccacttcattttgttttgttttgtgttgtttttatattttttaacaatgttatggtttcattaagggaaattaacaaagaaaatccttcaactctattccctatatgtgactctatgacacatgtagggaatatgtgtgttcccttccaaaccgtatccttttctaaatgtgtttagaaatccttttctaaatgtgttcttgatgtgtttaatgttttactttttacttaaaatttttattacttattttgtattcctcaaatatattctttctatggactgtataattctctatcaagttgacctaagtactattagttaccaaaccattttcccaccgttcctggattttaaccttatgtataaaatactgctagttgtatgtatgtgcagggtatgtgtgtgtgtgtatgtgtgtttcctttaaattacttccttaggataatttttcatggctgggcttattgggtcacaaggtgtgggcacacaagcggttttaggctctgcctaaggattccagggtgccatttttcaagttggcagcctatcttggctgagtcattgcacctacccaggctagagggaatgtaggtcaaaaggaacacttaacatttccaagaccttctttggaaatgagtttcctagagtcttattggtgggtatggttctagaagcaaggcttagattctgtacaaagcatgcattgacctgctaagttgtagtcctagggaattacgggttccctagagcatcctgaaaattattagtggcacgaagtcctgatcagtgtgaatgtgccttcagactgtaagccaaatctttgcataataccaatcattctacctataaaagcacaaatatgttattgttctcaatagccaatttaatgcggctttggggaggaaaaaaagagaaaagaagattacaagctggctgatcttgcttttatttctcttaaatctatccacacttctcaggggttatacttgtttaaagattgtatgcaactgtgcagtctgtgtgatttggaaagcaaatcaaactaaatatgaagttttcagcatgtgctgtttttaaaggatttcatgcatttattccaaatatacatttcttcccaagtagcactaaacctataatctttttcttgttacatttgtttttcggggggtgggaggccaagagggtgacttagctttggagtggaaggttcctattaacatctacctccttcttgtgcagcattattcacagcagagctattaaggctaattattttcaggtttctatcaaagggggatatttgagctgacaaaaaaatgcatttattgggaagacaaatggcctgtttaaataagaaagggaccattatcatctacagcttccacccccctcccagttattagcctatatagggaggaggaaccagagacccatgggagactgtaagtcagaggaggttctgggggaccgtgctcactaaaatgcctggaaccccaagaagggaagtagattttcctatcatgtctgtagcccacctgaattgttcattgactttggagctggtgtcagcctgtcatttttttttcctcctaggtgaaattcattgacccttgatgtgttatggaaagaatattggttgaggagctacatgtattagtcaggggaaactaactgctgtaacaaacagtcccagatcccggtggtttagtcagtctccattcactgataactccttgatggagagtgaggagtgtccagggacctaggcttcttccatgcaatggctctgcatttttcttgggccttgagtccttcctgggttcagcccatggatggagcaagcatgagaacatggaggattgaacaggaggatccacagtctgggtttttgggtggcacacatcacttctgcccattggccaaaactcaggcatatgaacattcataactgcaaaaaagcctgggaaatgcggacattgtgcactgacctgtgtccgctcaaaactcatatgttgatgccctcacctcagattgtgactgcatttggaagtagagagcctttaaagaggtaatttagttaaaatgagactgttaaggtgggccctaatccatctggctgtttcccttataagaagaggagattaagacatgcaaagaggcatcaggggtgcccatgcacagagagatgaccaagtaaagaggcagcaagagagttgccctgtgcaagccaaggagagaggtctcaggagaaaccagccctgtgggcaccttgatcttggacttccagactccagaactataagaaaagaaaggtctgttatttaagccacccaatcaatgatattttgtatttcagccctggaaaactaatacagcagctcaaatgagtgctccaaaacaaaagtcagtgtatttggtaaacattgagccagcatctaccatactgagcacttgtgttttggccccactgcaatagtcagctactgtaaacccttgggcaagtctagtttgtcctccagggctcagattgctcatctgtaaaatgggtacagtgatgcagatgaactctgagggtctccctatggttttgtgacctggatggtgcacagtccctcagctggcatcttggtcaggtaggggtccagtatctggcctactgtggtggtacactgaaggacccagattttagggttcaacctggattcaaatccccactctcccattggctatgggattttgagtaaatgagtgtctgccttagttacctcatctttaaaatgaggttaataaaaataaatacctgaaagtgttgctggattaagggattaaaggaaataatgaatatactgtaaagtacttattccagggcttcgtgcccaataaagacttaataactttgggctgggcgcggtggctcatgcctgtaatcccagcactttgggaggccgaggtgggtgggtcacgaggtcgggagatcaagaccatcctggctaacacggtgaaaacccgtctctactaaaaatacataaaattagctggacgtggtggcgggtgcctgtagtcccagctacttgggaggctgaggcaggagaatggcgtgaacccaggaggcggagcttgcaatgagccgagaccgccatgccactgcactccagcctgggcgacagagcgagactccatctcaaaaaaaaaaaaaaaaaaaaaaagacttaacaactttgtatctcctcctctctctttctctttcttcttttttgccttttaatttttctgcatattttgtaattattttcatgtaagcatcctgaatgtgaagatagagagtgggaagcattgtcacgcacgtgatctcattttatcctcatgagaggataagacagatgaagtggagccttattttacaaataaagagcactaagatgggggagttgtgggattcactgacaattccagagaaaagtgaaagtgagatcgaacttgggcctcctcttggcccagtgctgtgttgttacatgatctctaacctggccattctgggtatttcagggctcaggagatgacatgattcaggaaaggagagctggagtcatcaaccaatgccaggtccctaaagttccctcaggaagcacaaaatggaaatggcagctctttcaagggtcgggcagacaacaaacaaatatgttgcatttatagccaggaatagaaagaacatggttaacctccaaaagttcctgaatccatctgatgaagatgatgttgacttgacctagtttgggaccagggtttacttttctttgtgctccacgttacctggacttctccacacttctgagagtcagggacatggcctcgaaacaatgtttgtcctatatgtctagcttgccacagctctcatcttcaaaccaccagttcttggttttatatacatggcagaagatgccccagggccaggagttcccatcccaaatcataggctgaggatgcagcaccagggccaggaaggaagggaggaatagagatgacatattcatgtcctggttctgttgaccatgcttgagcttcagagccaggcaccatcctcctacttagaggtgatggcgaccagacagtcttttaagagaaaaagtatattttgcttcacttttattcaaaacaagctttctagagggctgaaattttggatgcactagagacagctggagatcttcaagctataggaaaatgacaatgaattcagcctttctgctatctctttcctgtagggcaggttatctgtctttgtcatggctaatggcaatttatgctatccatgaccactgggaaagaaaaatattcatatttttaaaatgaactgagacagatcacttctctatcagggacatggtcatgctagaaggaaggaagtagagtttccaaggtcatagtttctcagtgttttctgggaggtcaccatttatttatgatcttatcatttgagtttcaaaattaggatgaattctgctggaaccttaaaaataatttgaagtgatgagggcagaagaagctgctcaaatcctgtgcttttcaggaaatagggtactttttagatttgccaagcagcaacgacattgtcacccagaggtttagctggaaggtaacatacctgaagcctcaagattggggcattttcaggccatctatgaaaatgaaatatcccaagcccaccattagtattctcaagctatgaaagaagatggtttaggtcatttctcaggccatgccctctggtatacttggcctggatatattcaacttgtattctcattcctacccctaactgcaatattaacattttttttttttttttttttttttttttttttttttgagatggagtctcgctctgtcgcccaggctgtattgcagtggtgtgatctcagctcactgcaagttctgcctcccgggttcaggctattctcctgcctcagcctcccaagtagctgggactacaggcgtccaccacgagtccggctaattttttgtatttttagtagagacgtgttttcactgtgttagccaggatggtctcgatctcctgacctcgtgatctgcccgtctcggcctcccaaagtgctgggattacagacatgagccacggctcccggccaatattaactcttgaacacgtgtttacacaggtgaccttcagctatttaagcacagacgttccataatggaagggcagcaccagaaattcccagcttttgagaaaattattggacctgttattactggaaggaggagaaccaagatgaggtgatttaggatatttatctagaagatgagggaattaatacatagaggcatctgcctctctttgcattccaccaaacagcttaaaaggaatttcagggctgggtgcggtggctcatgcctgtaatcccagcactttgggaagctgagacgggtggatcatgaggtcaggagatcgagaccatcctggctaacacggtgaaaccccgtctctactaaaaatacaaaaaaattagccggacatggtggtaggtgcttgtagccccagctacttgggaggctgaggcaggagaatggcgtgaacccaggaggcagagcttgcagtgagctgagatcgcgccatgcactccagcctgggcgacagagcgagattctgtctcaaaaacaaaaacaaacaaacaaaaaaaatggatttcaggtgattctttttggaaggtctttcttctcacccattggctagtttctacccattaacaccaagcctcagtttttccattcttcttcccactcattcatccatcttatatttactttgtttatcagggtccttggaaggatttgggtagaaaaggaactaaaacagccttagccttcacagggagcactttctagggaagatggactcaagtctttcctctgtctcactatgctgacctcttctacagttgcttgggtgcctacaaattttttctcctttgtgtgcctgatgaagtctacaaatgttatagactgaatattttaaataatttgacctttgtgccttatagtactcttattccctttttattgtcacattctgttagaatggaatgaacagaattcttcaaagggctttttagattgccgtttgatctgactgtggagggaagaatgatagagagttgggtgtgcagttttgcacacttctgggtgaatgggcagtatgcatgtcatctgcctccctccaggctgaccacatgggctcctcagggaaaacacagcccagccagggggagtgggggtgggtctcttcagatgtatggaagtccttgtgtgaagagccctatgtggctttcaacaataaagtctcattgagttggaggcagtttggaaaaaggcttggagccccacattagatggataccagaagaccaacatcccattataaaaagaaagtccttacatcaaaatatttaaaccaaagggaaaggcccaagaagtatggaaaagaaacaagaaaataagcaaaagtagtgaaagtatttccttccaggacatcagaagctagaccatggctctagtctagaatcatctgataatgatggagatggattttttgttcttaaaaagaatgctctggataagtcatttcatgtcagcttttataacagttaggagtaagggaagagacctgccttcatcttgccagtctttttaggtgtgttggtccttacctgccaggaatttggtaaacttcatagcatagagccttctgtctggggtatccgtggtcatttgctgccagctctaagttttcttttgtgatttctggcctcatttcccactgttctgcagtgtattttttcagtttaactagatcagtgtatgtctcaagttcttcttcctcctcctcctcccttcccttcgaaatagatatgccttcattattgttcgcccaatctcttcactcactcatctaccttctagggaatatatatctcaccttctttctctcatcaatccttcggtgcccaactcagattctgtcctctatgaagccccctttcagaattcccagaccccagagctttcctttaactacatctttaagccatattatattttcaaatatttgaatatatccatcttgctttcccaagtgagaaggcaaggaatgtatctcatctaccttctgtttaccccatggggccaaacttagggatggtcctatattatcccttagtatttagcatcttctactacactgagctatactgagacagtcaccttcttccccatggccaattaccagggaagacccaatgcaccagcactcagttctctcaccaagtgttattctgaaaatatgtgtatgagacagtggccagccttggaccagagggaaattctgcaattctgcaatttatgtggatgcttgctagaggtcacaccacaaggccactgtccacatatcagctttgtctcaggagctgactcatgttttttatataaatcatagtgagttgcccattataaacaccttgtaacattcaaaaggctttatggctgttattagctactgcagttgtgatttactagctaattcaggctgatgtgtagatgagtgtgcccagggcaccatttgtcccatctacataagtcagagagtagaataggctgggtactcaaaagcaaatgtctcttccgacggcctgtggcatgtcagggcttgcttatattttcagttagcaggtcagcagtctctcctctctaggtgggctgtgtcttcacaccttgacacctccatccaagagcccttggtgggaagcacggctgtaacagacagtttgtgttcagcgctttcactaaagacttccttattgcaggcagaaaagaaaataaagttgtgagagaaatatctggaatggccctggtgacacctttatgtttcccagtgcattcagcatcagattttgtattggcttctagttagcagtagtcacacttaccacttgttctttttttccaatgaaagtatctggcaggatgcggtgactcatgcctgtaatcccagcactttgggaggccaaggtgggaggattgtttgagcccaggagttcaagaaaagcctgggaaacatggcaaaatcctatctataaaaaatacaaaaattagccgggtgtggtggtgcctgtagtcccagctgctcaggaggctgagcctggggaggttgaggctgcagtgagccatgatcacaccactgcactccaagctgggtgacagaatgagactccatctcaaaaataagtgaaagtaacactattggattgcctgtggtgtgtacatttatataaaatcagatatagccacagattgtgtttaggatgacatatgttttacgtaacatgtttatttgtattaatgttttaggtttttgctttctttttaatcctactaattgcctaagatgagatgaaagaaaattcacctatacaagtggtattctgctcttctggatctgaaaacagggactaaactgagtaaaacttataaagtagtttgtagtttatttgacagggagaaaaattatagaaacacacatgtatataaaatgtgtgtatgtacacacatacatgcttaccagatgagcacattatatgtttatatacttactatatagctatatatgcatgttatgtaatacatatattaaacactatcccttactttgttgtatagatttctgctttgattggctcacatttaatagacaatatctcttcttagtttcagatttcggtgccatagaaccaagtagcttgggtaggaggtagttctttgcaattccaaatcctcatccttcagcctctaactacagttgactctcaaacaacacaggtttaggactgcacagattcacctacctgaggatttttttcaaccaaatgaagatcaaaaattgaaattctcgggatgccaaacccatgtatatggaacaccaacttttcatattccatagggccaactgtgggacttgactatgcgtggatctgtgtatacgcagggggccctcaagccaattccccttgtctatcaagggatgactgtactaagttgacctagaaagtgtgatatttgaattgtacccttgcctcaggcttgatttccctgcctgtcactttggggtgagctgtccaacatggcaaggtttgtcttctaaatggttgcatcatccacaaaatcaggaaacagatttatttgtatctgttgtagttagtgcttttgcccgtgggtttctggtgggaggagcgagaactaggcagcctttgtacctgtgactcaaaggaaataagtctagcattttccattagatgtttattgctcaccgagaattggcttagaaacctgtattgagttgttacaaggaataaagctgaatgagatcagactttggagaaatcagagaaatgtaaattaatataagaataaatgatcaccttgtacccattaggctgggataattgaaaaaccaggtaatggcaaacgttagtgggatgtggggttataggaaccctcatgccctactggtagagttacagtaattctggagtacaggctggcttcattgagctgaattaatatactcatatcctgtgcccagcaagtccactctaagataaatatcccgatgaaattcttgcataggtccataaggaagttcgtaggaggattttcattaatgtattatttgtagtggtagaaagttgaagccagctttgagttgaaggaaattccaggagattggaaggtagaatgtggtagatgccttggagtactgagcaacaattagaagcagggattcagtggatgcatggcaacatgacctagattgcattgactacatgtgcttgtttcctgtgcttttgataaactgacatctggggctgggctaaccagggaaagactgtccttcccagggctagccaattcttagagattgcaaatgactcacttagaggtgtgcctttgatatgcaaaggaacaaatccagagcccctgctgtgaaccacttcctctctctggctcctacactctaggagacagaattcctctgccctaatcatcccaggaccagtcaagacagccagtcctacttctgcttaccttgcctggcccatctcgtcccagaaccaccacagtcaagactttactgcctccttctgccttgttgcctacccagatgcttccatgtggggccctgtgtaacatggcatgccccctcctcttgggaactagagtaagctatgttttcaatggcagtcatcccctgatctgttggcctcaccacacctaaataattttataacataggtataaaataaagtcacttcatggcttggcacagtggctcacgcctctaattccagcactttgggaggccaaggtgggtggatcacctgagatcaggagttcgagaccagcctggccaacatggtgaaaccccgtctctactaaaaaaacaaacaaaaaattagccagatgtggtggcgtgagcctgtaattccagctactcaggaggttgaggcaggagaatcacttgaacccgacaggcgaaggttgcagtgagctgagatcgcgccattgcactccagcctgggcaacagagctagactgcatctcaaaaaaaaaaaaaaaaaggggctctagtgcatcttgtggggaagaagttggttgaaccttgtttaaccgtttgtttcccaagctcatttgaccatgaacccttcctggtagcacctacttacttaaatatgaagcttggtggtgaacctctcagggtacttgagcctttctttctagcagagggctttgggctcctgagcaacattcatgaacggaggaagactgtgtggacaagtggctagggaaaggcacaacaatttgttggagaagaagccattaactgagataccacctcttccttagtatccaagggacttggctcagtaggaatattatgttttttcttttcttttcttttctctatttatttatttatttatttgagacggagtcttgctctgtcacccaggctggagtacagtggtgtgatcttggcttaccacaacctctgcctcccgagttcaagcaattctcctgcctcagcctcccaggtagctggggttatgggtatgtgccactgcgcccagctaatttttttttttttttttttttttttttttttgtagagtcagggttttaccatgttggccaggctggtcttgaactcctgacctcaagtaatctgcccaccttggcctcccaaagtactgggaatataggcgtgagccactgtgcccagccatattatgttttttcaaaccagaaagatatttggttcaagtcatagttttcaatcattgtgacctttggcaagtcctttgaattcttttggttcagttttctcgttggcaaatgcagctttgaaacttaacttcataggtttatgttgaaggttaaaaatgatatatgtaaagtatctggcacttagtagtaggttagtaaaaattagccactgttaagacattattatcaaaattattaatatcttcatttgatcttttatgaggactaacagtgaacctattcacaattagccatgtgactatagaagtggcttactcaaggtcacattgctcattaatagcaggggtgggactacaatttacttctcttaggtccttgctcaatgtcatcttcattacactggaccaagggtccttttgcctatttcgtgactgaaggaactcagcacaagctctttcagtggactgaatggaccacttcattgcagcactggagagagatgcgggatgggattcagagggcctggggtgccactgggatttttgcttcagttatactctgcatccttgttaataacctagagaaggttgtaaagaatatgctcattatatctgtattttcccctaaatggagaggtattacaaaccccaccaatgacagagacgtgacataaagggacctggagctgtcaggcatatggacaggaaatcactagatgagattcagctgcaataaatgcatcctaatacatctggggacaaataatccgaaacacagatattcaatgggaggaagatatttggaaagcagtaaatgctgaaggggacctgggggatactggacagcaaattagatgtgggttttcattgtgttaggccaacagaaattggtaatgcaatcttgcgctgtattttccagcagtcccctggagcagctgggaggagaaagcctctttcaccagccaagatcaagtctgctcgccccacacactcctgaagaatggcctggctggggctggggtggagggaggggtcgctttactttcccctggcccctacctcacagggatggtgactttcctttctctaagccttaccctgaccctgtgtccttggagagtcggtctctttcctgtctcccagcgtcttgctgcagaatgctgtgggatgttggtctgcctgggacagccaagggaggacagtcctgcctggaaagtcctggtctgcagggaagacttggcctcaggtgtttgtttccatgtaagctaaacatagccatcttttctagtgatcctggcttcctccccgctctccctcacactcacacccccatcctcttcctcatgaaggatttcacctgcagatagcctctatagacagaggaatatttgacaaaacacaagcatctgccccagcagctgttcccagcaatggggatcagtcaccaactcctcccacctcctccttctcatgcttcactcttctgcaccaccccccgcccaattttatagtcttctcaagtttaaagacttcccttgacatgcataaaaccaaatttctcttctggggaccagtgaacacatattctgatttttttctagttcctcgccttaccccattctcaggaaagcccagttacttcgtgagttcagagcacttccttgctggggcgcctgctaagtggggtgagtttaactggagcacccctcccaacttttgggaaagagttcactctcaccaacccatactttctgcctttccttctctgggattgtcttacctctggaaatccttcagggacttctagggaatggctatgtcaatggggctggtaaaaagcagctgtgggctggtaaatgtcagaagctgtttgcaaggctgggaaaattcactgtttatttcttcaaacaagccctagtttcctccactgagaatgttcttcatcaaactcatcattcaggtttgtattcagagcagtttagcttaggcatgcaattgtcagtcaacactcgtaagtaagtggccaagtttaaagttactctttgaatatttctatacactctattcagtaagtgttcaccaagtcccttctctgtggctaccacacagctaaatactcatgtgtatatgtgtgggagagagagcgttttactctcgtggaggggcccgaatgaaaaaggcatcaccgtggaagaacttgagctttcagtcctgataggtcatggatataaatggatggcagctgctagcacagtgatttatgagtgatgctcccagccaaaggaagtcaggcacattctagaactgcagaccgctgtgtacagggcatctcagtatatttagcaaaatgagattgcaaaccacagaaaaaagggctgagtgggtggagaggaagaacattctctggccagaaacttgctgaactttgaggccagggaccggaggctttgcagaggtggggagagacgttctttggcttgtccgacagaaataaatcaccactgaggagatataccaaaggccaattatatggagtgttttcttggaaaatcatctcccagacaggccctgtaaatcatccccagcattggcagacattcagatctgcctggtggggcgggtggcatgccagtgcaccccagtgtcaggtagaggaattacacaggggtagtctcgttgtagcagggaaaacagaggtcaggtactagctgtcttcatccgaggaagcagtgtagggcagaactgtttgttctgtcctaggaattgtagggccaaggcttttgaccaggttttgccacttacttgttctgcgactttcagattctctacaaacagagtggggactgggttatctctgaggttcctagaagccctgacattaattttatgcctttgtgttctctataacttctgcatagcgtaagcttttgcataccacaccctatgctggtaattatcccaagagagacaaaaatttccatctacccagcaaggttagtcatacaggatcatcttgggagggtgattggggtccctcaaagccaggtcctcagtgtagctgtagagagagatgggaatttagcctggagaatgaagagctaagggggatgccagaggtactgtgttcaatattggaagggcttcatgtggaagagggatccgtgtctgttgtcctactctgtaggccaaaaacaggaccaatgaactgcaaatagaggggcccaaaaggaaggaaaagataaaccagcaatcattattccattgctcagtgacacaaactttgatttcctcagtgtttgaaaatatagcaagaactcttaactggccaaatgtggtggctcacacctgttataccagcactttgggaggctagagtggaaggattgcttgagcctgggagttcaagaccagcctgggcaacatgcagaccctgtctctacaaaacaaacaaacaaaaaattatctggacaaggtgtacctatagtcccagctacttgggaggctcaggtgggagtatcacttgaacccgggaggttgaggctacagtgagccgtgattataccactgcactccagcctgggtgacagcaagacacacaaagtctcacagacacacaaaaagaactctaaccatcagaactatccaacagtggcacctaaacctggcagagcggaaagtgatccatcactgctgtaatctagccgaggctgggtgacagtcatggtcacagcagagaggacaggatgctcctttctgctctatctgtaaccatcttctgtccctggaatgagctgagtgaggaatgctctccctcctctcctcaaagtatcttccttgtcccagcaaagcttcattcttcctattgaggaggggttcatttatctctaggagagttatcttaaaatttgtctactttttggagaaaatatatattgagactttgagggtgggaatttaattggttgccaataaacaggaaggccccaagggaaagaaatgagaattagaaactgactcacaatatctggatgggaagccaggcaggagggaaactcaggctctcgaaagggaaatctgttgggcacccagcttacttcttaattaccttttttgttaatggccagcccattccttatgggtttgttgttggtgggtttacttaaacctttttgaaatatattggttattttagcttgtactgattctggaggcaatgaatccacaaagttaataaaataattcttccatcatcttaaaattatttcttcattcaagcttcaagatttccttcttcttcccatattctagaatgaacaattgttttttctttatttatcttctttgtgattctattgattctgttgggatcccttctcagtctttgactttctttctagacaaagccctcctaattgttctcattagtttgagtatgacaattctgtccgtgtgattaattcaacacacacctaacatttattaagttcctactctatggaagtcgttgagcgagacactgaggctagaggtgaaaaagacacttttcttgccattctttatacaggattgtagcagaaccaaattagttgtaatgaatagagtgctatgatacatgatgcaaacactggccattgttcatgaggtcactttcatctacctcctgtgacagatgaaatcactgagactctgagaatttcagtgaatcactcaagttcctacagctggtaaatggcagagctggggtctgaatccagggctgtctgactccaaagcctgcatcctttccactgtgcaacacttccctttgtttgattgtcgatggaaatacagagaaacatgtgacttaagaatgagttggggaacttaattgcactggtgaaaaatgaagacattttataataaaacacataggaagatgaagtagaaagtttaccagtgtcctgggatcctccgcaaccactttgaggagaatctgagctcttggtatgcaggcttggaatcatggctctgtctggcgttggacataaaatggtagacttgatgcagactccagctcagtcatccttgtctgttatgcttggaggcgacagctctgcatgaacccattaactcagagagatttcggcagagcctttcccttccctgaccactgggcacgagtgcaccactctgctctgagctgatcagctttccatatgcacggaacaaccacagcctccctccccatctttcatcacctaaataagggcagttaatgtttaagagtagagaatagggaacataatgatggataaattataagtttggggatatgaaaagtcaaactgtgtaaatatgtattttaaaccacaaacagaatgttaatgcatctttcccattaactcactaactgaaattacagagtgtaacgtgagccaacgcccacgggttggttatgatgttttcagatttagaacagcaaatgataaatgcccttctctcagacaaagaagcgattgacacagcttttcaatgtagtcactggcaatgtcagcagtggaaaataaactgagcaccaggaggagagacgtcctgagatacctgcggaaagtggagtgtgggctactgttaagcacctcctgtatatgggggaatgtctcaggggtcggtgcagcccctccgagcagtgaggacccaggcgccattgcctggactgcctttctggattagagggaaggcttgttttctcaagcatcagctctatcttgctctgggttggtgggcagctgccgtgaagccagtttcactgtggctaggtttgggttggggatgtgtggtttttgcatcagccatttcattgtttggttgcttatgggcagcagtgtaaaagagaggttaagaggatgtggagaaattagaaccctcgtgtgctgttggtgggaatgcaaaatgctatggaatagtatggtggttcctcaaaaaaattaaaagtagaattactgtactatatgatccggcaattctgcttctgagtgtataccccaaagagttgaaagcagagtctctaagagatatttgaacacccatgttcgtagcagcattattcacaatagccaaaaggtggaaacaaaggaactattgacagatgaatggagaaacaacatgtggtcagtatattcagtggaatattattcagccctaaaaatgaaggcacttctgacacatgctacaacatggatgaaacttgaagccattgtgctaagtgaaataaaacactcacaaaaagacaaatatgattctacttatattcagagagacagtagaagaggggtcgtgaggggctgggaagagaaggaaatggggagttattgtttcacatgtacagagttttggttttggaagaggaagagttctggagactgtaccacaatgtgaatgtatttaccactactgagctatatatttagaaatggttaagatggtaaattttgtgttatgtgtattttaccacatataatattactgcatctttgtaagagaaggagaaggaatccagctttagggacttgggtagattcactgctgctgtttacttgctgtatgactttgaacaaattagtaaacactgtaagcctgctcttctcaactgtgaaataatatctgctgtaagggttgtaaaatagcgagtactcaataaatgtcagcatccctcactttggtgtttcagaaatcctctcttatgcccaccccaaactgttctcctgaaataaacatggtggacgtgtgtgtgtgtgtgtgtgtgtgtgtgtgtgtgtgtgtgtgtctgtgtgtaaaatctttgtatacatggtaagttatgcatggacttctttctgggctgaagtttggctctattaacgtttcttcacaaagatggattccttccctttgataccatctctgcactttgtccagttcccctgcatgtctttaattgaaggatcagaaagtaaatggggtatcctggagagactgcagcctgggcattgtatacctcacttcttgttagcctggtggtcctcatggcccttgggcagctcactcatagtcacttgggggtgctcagtctttctcatcccaccccaggatctgcctccctggtgcttcctccctgccatgcatccccctcccaccaactcccttcatccccaaactcccaccccttcttttagaggtagagtctctctttgttgcccaggctagagtacagtggtgatcatggttcattgtaacctcaaactcctgggctcagttgatcctcctgcctcagcctcctgagtagctgggactacaggtgtgtgccaccacatctgggtgatttaaaaaaaaaatttttttgtatagatggggtctatgttgcccaagttggtcttgaactcctggcctcaaggatcctggtgccttggcctttcaaagtgttgggattacagatgtgagccaccagtatccccctttcactggcttttgacactttcttggcctcttttggccctgagccaagtaaccctagggcatatttcaggaggaggttgttggcatttctgaagcctgtgggacaatttggctgtatgcaaatggttgagggtcattttcccctgaaggttaaatggtgaccctggtcaatgtttagctagtgtgcacttaaatgatttcccctagttaatgaatcataggacaaattagctgaggactttcgcaccctgcaggtaagctggggtggtaagaactggtaatactgaaattgtgttgagttatgtaggctatgcagtgcaggatctgcttagcacagctttccggtgcttagatcctaattacaaatgtaaattgagggctgcaactgttggagagccaccaaatgatgacctggatatacttatttctgagcctgctcaaacatccctcctcttcaccttaggaagccctatatccaatctctcttcctctatccctgtcattcccaaattgtgtgctgagactccccagagtgctgcagcagactcacagggatgatacgggatattttaaatgtttgaaggcaatacaaccacatgcaacatctgacagacgctatgtgaattaccatctcaggtgtttcacagtttcatcattagatcatgctacaattctttggataatactgtatctttgcaaagttgcataatttttttcggtagttgctgtgattaaaagcaagtgtgtatggaataggaaatgtggatggcagtgcctaatatgtacaattccaatattaaggaagttgtgcagggcccaataggtacacacatccctttagtaaacaagtgtgaatcttgaagaatgaaataaaaatgtttcctttcaatttatgcatttttttatcaaatggctattgagttattaggacataaatacttattaagttgttccataaaatggaactcaggtatttcttttggtccgtgggctctccctggaaaacattactgagaccgttagggcaccatgaactaagttggagagttattgttattattattttttgagatggagttttgctcttgttgcccaggctggagtgcagtgacatgatctcggttcactgcaacctctgcctcccaggttcaagcgattctcctgcctcagcctcccgagtagctgggattacaggcgcccgccaccatgaccagctaatttttgtatttttagtagagacggggtttcaccatgttggccgggctggtcttgaactcctgagctcaagtgattctcccaaagtgttgggattacaggtgcaagccaccatgcccagccaaattggagagttattatagacaaaaaaaaaaaaaagaaaggatcttcccctccttaccttcatcagtcctcccactgtgaactctcccttctgaacaaactcactgtgtcccttatatctctctttcttcaccattagctccttctcccacctgaaagatgaagtttcattgatcctttaaaaataaaagaaagaaaatcaagccttgtcgaatgttgttaccacctcctcttccattctcctttccttctcctcctccttctcctccatctttccctttccttcattgcccgacttaagaacagtcttgtcccgattcctttactgctcatatcatatccacattgctaaaaccttgtctggctttgtcccctgctgctgcctttatgtggccctcaccagggtcactgacaagttccaaataaccaacccaacgccactcatatatctgcatcatagtcacaataagctgaggtctcacgttcccccacctgatattttggcttctgctggttcctgtgtctagaacatctgcagctgtgttaccttctcattaataacagtggtgttgatagctcatcttgagtttccttctcccatagagcctctggggacctcaatacccccttaccacgctatccgccaaaatgctcagaggtatttgaagccacaggctgtaccacacagttttgtgtcctctgtagtactttcacacacagtaggaaggtagtaaatatgggtttgaaaggagcagcactgttcagaataggtggtccagactttggtctcccaggaacccctgctaacatatgctgaaagaacctataggtatgatgaggttggcttctgagatggaacgatagactccaaatctttctctcaacttaccaaatagagacctttctttctcattatataagtaatgcatgtgtactgtagataagttagaaaatgaataccaaggaaaggaataaagcttatatttagaaataacaactacttatacttgtatttttatatattaactgttagaattttatttccgtatatgtgaaagatatatatttatgaagtataaataggattatattttacttgtttctttatgatctccttttgttgcttaggaacactacatatggtgaaatagaatagatgaatttaataaaagttacatagtattttatattacactattgctcattattatttttaattttgaaaatatatattacatcattattccaggaaattatctatatcagtactactcaaaggtgtccatggactggtgccagtatgaaaattaatacaggtccatgatataagtacaggaattacgagtaaggcttcagaaacttttaaaggaaagtaacattcccatatctggtaactcattttagaaactatttttaatacaaaatattacatattaaatgcttattaacagaagtaactactattaaaatcattccatattttacacatatttcaccacctaaccaccccccagtgcccgcccagattttttcatataactgggaagccacagtccatattattcttccactggcttttttcacttagtaggtttctttccaagaaggtaccaaagagaaaaattgagatagaatctattgaaggttcttgaggaataatttacttatagtaaaatttacccttagtgtagagttccatgaaattaacccaagtgtagagtctggacaaagatgtctgataattatcataacaatcaagataatgaacagttacctttctggaaaattacctcctgtaccttagtagtcaaccatccccaaccatccctaccatccccacttcctggcaatgctgattctatttctgatcctaaaatgttgcctttttgagaaataaatggaatcataccatagtttggactctggcttcttttacttatcataacgcatgtaagatctatctatattgttgcaatgtatcagtagttcattcttttttattgccgagcagtttttcacatatggatgtactactatttgtttatccattcataagctgaggggcagttagtccagattttggtgattatgaataaagctgctattaacatttgcatagaatttttgtgtgaacatgaaatttgtgtgtggacgtgttttcatttcttttgggtaattacttggaagttggattgctaagtctcgtgatacatgtatgtttaactgtgtaagaaattgccagactgtttttcaaagtggctggctgtatcattttgcattgcttccagcaatgtatgaatgttccagttctactcacttgctatatataacttgatattgtcaatatctttttgttttagttttagtttcaatttttgcctttccaatagatgtgtaatgatatctatgccattgtggtcataatttgcattttcttaatgactaatgatgttgggtaccttttcatatgcttacttgggattcacacatcatctttggttaaagtcggttcaaatcttttgtccatttaaaaaagtgggttgtcgggaggcggagcttgcagtgagccgagatcgtgccactgcactccagcctgggagacagcgagactccgtctcagaaaaaaaaaaaaaaagtgggttgtttgattttttatattgagttttgagatttctttatatcatttagatataagtcattttgagatatgtattttgaaaatactttatcccggtctgtatcttcctttttcattttattaacagtgtcttttgaagagcaaaagttttaaagtttgataaagtccactttatcaacatttttcttttataagtcatagttttggtagcgtatctaacaagtcttggctaataaaagattataaagattttctcttgttttattttcaaaattttatagctctagtttttacatttaagtgtatgatccactttgagttattacttgtatatggtgccaggcataggtcatgggttgtttttgtttttttgtatacagatattgaactgcttcagcttcatttgttgaaaaggcctgcctttctcctgcttgcctttcatctttgtcaaaaattaattggccatgtacattggtctctatctttagactctattctatctcactgatttatgtgtctatcctttcatcagtattacattgtcttaatcactgtatagtgtattttgaaatcaagtagtagaagtcctctgattttgtacttttttgacaaattattttgggtattctagttcttttgcatttccctgtaaattttaatatcagcttgttaatttctataaaaaattttgctgggactttcagattctgttgactatgtagtgcatttttgagagaattgacatcttaacaatattgagtctgtgaagatggtatctctctctattaatttagatctttttataacttttaatctgttttataattttcagcatataaatcttgctcatactttgttagatttgtacataaatattgtatgtgctttgtgctattataaatggtatgagcttcgaaattttaatttccaattgttcattgctagtttcactttgctaagcttacttattatttctgagtgattttgtaaattgagattttttttttcaaattgacaatcatgttacttttatttttattttattttattttattttattttatttgagacagagtcttgctctgtcggccaggctggagtgcagtggcatgctcttggctcactgcaacctccgcctcccaggctcaaacaattctcctgcttcagcctcctgagtagctgagattacaggcatgtgccaccatgcctggcttatttttgtatttttggtagagatggggtttcaccatgttggccaggctggtcttgaactcctgacctcaggtaatctgcctgcctcagcctcccaaagtgctgggattacaggcgtgagccaccgtgcccggcttcatgttgcttttaaatagagacagttttatttcctcagtttcaattcttagattctttaattatttttattgccttattctaccacttagaacaacagtacttagaatcacagtaacttagtaccacaattccacagtactatgtaaaacaggcataatgcatgcagatatctttgccttaatcccagtcttgaaaggaagacagccaggctatcacaactaagtatgaagttagctatagattttttgcaaacgtcctctatcagattgaagatgttttcttctatctctagtttgctgaaagtttttatcattaataatgttgaattttgtcaaatgtttttctgcattcattgaggtgagtatatagtttattttctttagtctgtgtatatggtgaatttcattgattgatttttgaatattgaaccagccttgcattcccaggataaaccctacttggtaatgacatatttttaatattaatatattgctagatttgatttattaatattttgttgtagattttaattttaaactgatactaattgtacttattcatgtgatactttgtgatatttcaataaatataatgtatagtgatcagatgaggataattagcatatctattatctcacatatttatcatttctttgcattggggaaattcaatatcctctctagctatttaaaactatgtattattgttaactatagtcatcccacagtggtctaaaacactaaaacttatttcccctttctagccatattttcttcatctatgtttgtaattaatattggtctatagttttcttgtgatattttatctgattttggtgtcagtgtgtaatacgttatacaatgaatttaaaagtgttccctcctattttctagaagcatttgtgtagaatttgtattattctctacttatatgtttggtagaattcactagcaaatatatctaatgaatatagatacattcattagacatgtagttttttatcacttttgttgtcaaagttgtcagaagatttttaactacaaatacaatttctttaattggcagagggctattcagattatctatttccttttaggatgagatttggtaattggtgtcttcaaagggatttgacaatgccatttaaatacaatttagggtcctaaagtttgtaatattctttcattatcattttaatatcttaaatatctgtattagcgtcccatctttcattgctgatattgacaacttgtactttcttcttttttttcatattaaatctgactagaagtctatcagttgtattgacttttttttaaagaactagattttggtactactaatgtaaccgcccagcaggttcaccttacctgttgcctagacagagccaatttatcaagatgggcaattgcaatacagaaagagttattcacccagagccagctgtgtgggagactggagttttattattactccaatcagtctctccaagcatttaggaatcagagtgtttaaggacaatttggtgggtagaacccagtgagtcaggagtgctgattggtcaggttggagatgaaataatagggaggtgaagctgtcctcttgcattgagtcagttcctgggtgagggctaccagatgagccagtttatcaatctggatggtgctagctgattcatcaagtgcagggtctgcaaaatatctcaagcattgatcttaggttttacgatagtgatgttatcctgaggagcaattttgggagggtcagaatcttgtgccttccagctacatgactcctaaaccataatttctaatcttgtagctaatatgttagtcctacctacaaaggccatctagtccccaggcaagaaggaggtttgtttcaagaaaggtctgttattgtctttgttttgaagttaaactattaatataaactaagttcctcccaaagttaatttgacctatgcccaggaatgaacaaggacagcctggaggttagaagcaagaaggagttgattaggtcagatctctttcactatctcagctataattttgcaatggcagtttcattaatttttttaattttcttttttattttattcatctctgctttgtctgtcttaatttatttgttcttttggctttgcatttaatttgcttttatttttctactttcttaaggtagaaacctagattcttgatattctttactagtgtaagcattttagtgctataaatttccctctgagccctgctttagctgcatcccatgtattttgttttattcaattaaaatatattttccacattgccttatgacttccttttacctgtgttctttagactttaatttgttaatttcatatacttggcaatattccagatatcttttttgtattcattactagtttaattttgtgtggttaaaaaggaaataaataataaataaaccaatagtaataataataattttgtgttgttagataacacactttgtattatttaaattctgttaaatttattgaggtttgttttattgcccagaatactgtctgttttagtgactgttttgtttgtatttgaaaataatatgtatttttactgttgtttcatatgaggcttcataatgttaattaggtcaggttggttgatagtgttgttcaggtcttctatatcagtgtctactttattgattagtgagagaggagtgatgaagtctccaactgtaatcatagatttttcccttttttctttcagttttatcattttttgctttatgtattttgaagatctgttgttaagtacatacacatttaggattgttatgtgttcctgataaatgacctcttcatcattatgtaatattcttctttatttctggtaatggtgttgcagaactttgctccttagttcagctaaaaccaggttcttgtcacatgatcaggaaaagttaggcacacagacatattgaagggtaaagggaatgtggaatctattgggcaaaaaggaaaaaagaaaaaaaactctcagaaagcaagaggggttcctgctaacaggcccccatctcacagattgatttcaggccatacacaggaacggaagaggccaggctcctccccacctccacatgacacaagcttcccgtggcttcagccctttctcccagtgtgcaggcaggtcggagattccagggaccctctcccttatctgcctccaacatcaatcaatggcttttgctttatgggtgggtcttgctcattgatgagtcctgcctcagctgtaggagacctctgatagtccaggtctaggatcacttactgttcttctgcaggggttgaagtctttcattctttaacattttcctcagatacagtatgcccccagcatgacagtgtatgctacctctttcccagcaatttaaagcttttgttcttttaagggacaagtaattttgaagagctctctgcctttccattagtagcatctgctccctcctgtagaattgagggtagctttccctgtaccctagtcctgcccccactctttctctgtgagcacatagagaggtccttggaaaagagtggctgtgaacccctctgtgtctgcagttccagggattctattttctcatgctagtacatagttggccttcagcaatctattgaaaattttagctgaattcttcacatccaggcatcagaggccccatcttcctcccactggttcagttccctgctgggatcaagaaaagtaataattttacaaattatccagctctttttttttattgcatgagtgatattctctccagctttttatattcaaagaggaagccagaagtcctaataattcattttattacaaaagtatctatttatgaaggataggaaatttaatataaacaaaaactactgattgtttaagaagtgctagtctgtacctttatgaactgatttatattttcattctatgccacatcttggtcttattaggtccttgggtttgttacctggtagtaaggctggctttttgttgttagttctaaatttacatcttttgaaccaaaagttctagtatggcagaatttgctgactattcatgtattcacccttattatccccttttccttttaaaaaattttattgccaggcacagtggctcatgcctgtaatcccaacactttgggaggccaaggcaggcggatcagttgaggccaggagtttgagaacagcctgaccaacatggggaagctctgtctctattaaaaacacagaattagccaggcgtggtgccacacacatgtaatcccagctacttgggaggctgaagcaggagaatcacttgaacccgggaggcagaggttgcagtgagcctagatcacaccgctgtactccagcctgggcaacgagattgagactctgtctcaaaaaaaaaatgtattaagatgaaattcatattgaacatttagaagtgaacaattcagtgacatttagtacattcgcagggttgtgtgactgccctttctatctagttctaaacatttccattgttccaaagtcaagctcgtaacccacaaagcagtttctcccatttcccactcttccagcccttggggaataacaatctgcattttgtctccatggatttatctatttcttataaatattataaatatgattatgaagtttatatatttcttatagagtcttacaatatgtgactttttgtaaatgacttctttcacttagcataatgttttcaagattatccacatcatagcatgtatcagtatttcattccttttcatgactgaataatactcctttgtatggctatatcacattttgtttatccattcatcctttgatggacgtttgggtgtttccatcttttcactattgtgaatagtgccactatgaacatatttttattgcatctgtttttttaacttttattttagatgtgcaggttttttacataggtaaaccgcgttgttgtggggtttggtgtacagattgttacccaggtaataagcacaataccctatgggtattttttctgatcctcttcctcttcccaccctctaccattaagtaggccccattgttgttcccctcttagtgtttgcgaattctcattgtttagctcgcatttataagtgagaacctgcagtatttggctttctgttcgtgcattagtttgcttagcataatggcctccagctccatccatgttgctgcaaaggacataatctcatttgttttaatggctgcatagtatgctatggtataaatgtaccatatttgctttttccatttaggtcagttccatgtcttttgtttttttgtttgtttgttttgagacagggtctcactctgtcacccaagctgtactgcagtggcgcaatcatggttcactgcagcctcaaacacctgggctcaagctattctcccacctcagcctcctgtgtagctgggactataggtgtgcaccaccatgcctatctattttttaaaaattttttgtagagatagggtcctctgttgcccaggctggcctttaactcttgggttcaagcagtcctcccgccttggcctcccagattgctgggattagatgtgagccactggcctgaacatgtcctgcttgagtacctgttttccattctttagggtatatacctgggagtggaattgccgggtcatgtggtaattctacgtttaatgttttaaggaacctactatctcctttgactataatttttgtcatattgctctttgagtttgtcttcccagagggccctaacttttcattattgaagtaagacaggcaaggaagtcatctttctactagtttcatgtaggaacctttgtagcttctctaaagaggatgatttttttgggtctcctttaagactttcctagcaatttcataaccttcttggatggaagatacaacatggcaaaatgcagttgaggataaagaggttgtttttaacaataagagccctcttgaaaagtcatgagttttgcatgacaagaagtgcttccagttgccagtgggagagtttcctcatcatgcagagtggatgactcactgcccttgactgctcttctgatcccgggggcctctgttctctcacagtagatgcagcacacagagctgccaaggcatttccagcagggggttctgtgctcaggttttgaacaagggcagcatgatggagcctgacttactcatacacttcctgaggttgatgaacacattttcaccccttttagttgtggtaggtaatgtattcataaattcaagcctttttcccagattgtaatggatagtttatatctctctcatgattatttaattattcaagccaggatgactgtgtgttttctatcagagtttgggctgcctcagcaagatgcagactggtatctgcccttaggttaaaaattccggccagacatagtggctcacgcctgtaatcccagcactttgggaggctgaggcgggtggatcacgaggtcaggagttcaagaccagcctggccaagatgatgaaaccctgcctctactaaaaatacaaaagttagccaggtgtggtggtgggcgcctggaatcccagctacttgggaggctgaggcagagaattgcttgaacctgggaggtggaggttgcagtgaatggagatcatgccactgcactccagcctgggtgacagaatgagactctatctaaaaaaaaaaaaaaaattccacaccattcccttcttccaagtatggatggaatttcttccaggatctgccagcttttgtgtgtgtttgtgtgtgttgtgtttgtttgtgtgtgtttgttgaatgtctgtctaccactagaatgcaaggcccaagcagggaaggaccatggctcttctaccctctgcagactctccagggacggcactatgcttgggtgtgtggcctactccctatttgtcatcccagacctatgttttactcttctttcccttgctctgtgtcctggggtgataatgccttcaaccaccaggctccattgccctctggcttctggttgggtttggacaatgagggagaggtagggctacttcccctcccattgccacctgcaactttgtggttctggctgtgtccatccaggactatagcctttcatgccaggctgccctccctgcagctctgggtctccctgcagctctaggtctccctgcagctctgggtctccctgcagctctgggtctcaccgtgtgtcttggccacggctatctgctctgggtagctctggtgcttcagtgtccccggggttcctttgatcttgcccacacccctgtaaagaatttgttcttttaaaatcccaggtgaatatgccttctctttcttgccagggtcatgacaatgggctgaatttttgaatagatgagtggatggatgagaagacgaagggccgtgtttgtggctcaccccccatatggaacccccctctggctgccatctcactgggaggccttgccctgtctcatgtccctgctgcctttctcctgcactcccctttctcaatctgtcccaaccatactggctccattgctgtttctagaatgtacaaagcaagctcctgctccaggcctttgctctagccattctctctgcctgcaagtgtcttctctcagatatccacttggctaattaccttttctaggttttgctgaaatcttaccttttctatgagcctcacccaaaccactgtatttaataatggaaactgccctccaccaatatcaccttggcagccaagggcctccttcatcttggtctgtgtttcttttttccagaacacttaccacgttttaagaaactgcatttgacttatatatttattgacataaatattatgcttaatatttatcatctgtctctacctgctagaatttaaactccaaaaggcaggatttcgttaccgtttttttccatgggtatattccagactcccagagcaatgccatcttcacaataagtgcctgtgataggttgaagagtgccttccaccccagaagatatggtcccctggaacctgtgaatgtgggcttatttggggggtgggggggaagagtctttacacatgtaattaagttaagaagtccaaaatgaaatcttcctatattagtgtaagccctcgattctaggaaaagttcttttaatagaagagacagggaaacagacacagagacacaggggagaaggccaggagaagacaggcagagactggagttatgtagccccaagccaagacatgcctgaagccaccagcaactggaagcggcaaggatggattctcccctagagcctttggagggagtgtggccctgcagacttcttgatttcagaaacctggcctccggaactgggaaggaataaatttgtgctgttttgttttgtttttttgagatagtcttgctctgttgcccaggctggagtgcagcggcatgatcttggctcactgcaacctctgcctccccagttcaagcaattctcctgtctcagcctcctgagtagctgggactacaggcgcatgccaccatgcccggctaatttttgtatttttagtagagacagggttctgccatgttggccaggctggtctcaaactcctgacctcaggtaatccacccacctcagcctcccaaagtgctgggattataggcatgagccaccaggtccagccaagtttgtgctgttttaagccatcaagtttgtggtcatttgttatagcagccccaggaaactattagtatagtgcccaataagcatgtgccgaatgagtccacgcaagccttgttaacactgatatgacctccatttgaaataattcttctgcttttaatagctaccaatgcctgttagtaaatgtgagtacgtctgacatttaagcagtgttccagtttggggtatggtatggtccatttttgcagtagaaacttaaacttcctgaaaattttcacccactatgcttaacagcttaaagtctaacctaacccccaaataattgctttcactgtaaacctatcaatagcgtatggagaatgaactcacaaattattggttcttcaggcagtggatgggaacccctgttggtctttagccatgaaatatccctgtatcatttccccatttttatcctgagtccctcctgctgtatttaagctaattctcagtgattgtgtctttggaggagtccgtcacaagcatctatgtgatcaccctttgtatacctgacaggggttattttttctcccccaggcccagtcctggtgcgtgctgggcttgtgatgcagtgtggtactaactatctgctccttgtaggagacggaaggtaaatcaaattgaaaacacccttcctgtgtagtgcgtcttccaaatgtcctcaggtctctattacatcttctggaggctgccagattctctgcgggacaagaggaagctggagcagcttctctgtagcgacagaaggtgccattagcagaaatacatcatctcccagtggtgctagcaatagcagagtcctgatcatgtccattcttttgccagactgaggagagagtcctcagaggcaggggctgctggtaacagcgcctccatcattctaaaatattccccctggagtcccagagcagctatttctgcccagacgcaacgagagcttcacagagcttatttcaggcattgatctttcacaaaagcctccctgcttcctagattccaggccttctctagaaggggtgggggaggtagaggcctgcacatggctgatcagttgctctggctggggctggatcacttcttccaggtgttgctcattagatctcttttcaagggaaatctattagcctggagcagtggttctaaaactgcagcttgcagggcttggtaaaacaaatttctgggcctcacccctaaagtttgggatttagtaagtctggggtagggcctgagaatttgcatttctcacaagttcccaggtgatgctgaggctgctgacctagggaccacatttcagaaccagcggcttagatgcagagagacgatgttcttgtgttctctcctacttagtcttggcctcagtcctcctacttaaggcagtctgggccttttgaggttgggccaggccctgtctcaccctgtttctggaatgcagtgaaaacagctcttgattctgtgcagcccatctgtgctagttacctctgtctcccaggagaagagagcaatgaaccttcttcctccatggctctgtttccgctgtctctgttaacactgtttcctcccccttggtcctttagccctcacagcttcccccttttgctggtctctggatgcctcaacatacctgtgtggctcctctgaccctgtcctttaaatagacctttctttttattttattttacttttttgtgaaactttaagttctgggatacatgtgcagaatgtgcatgtttgttacataggtgtaaacgtgccatggtggtttgctgcacccatcaacccatcatctaagttttcaaccagcattcaagaccatttgtgttgaattctggttcctgctggtaccatgtcctgggatatttcttcccttaggggcaaagagttttctagacagactgagtcagaatcacttagtctttatctcaagagcagccttgtcacccacagtagaaggcagaattactgtggagtctaacagaaattagggaagtaagaaatttataccaaatggaaatatggaagatttatctcacttatttcaagcttggggaaatactagcctttaaatgtctgattactagagcctgggaataaagagggactgcttaacctagggaagtggtctttggtaattgggtctctgatccaattgatcggcgaacaaatctgtcatcatagagtcactggggcagctaccctcggcccaactctgctgtaggtgcctccatgacctgactagatgtagttgtgaatggagctgggattgtggagggacttcatatgtacattacgcatgtgtggaaaggtaaaataaccatcagtcttccaattagaaagccagaaagctacctgggacataatcaatgagggcaggcagattcacattccatttgggtgtgcaagggtatgtgtgtatatacgtgcaaagataaacacccctacacacatcattaaagaaaagaatggaaggaaaatcacccagatgttaatcatgtttttctctggttattgcaattacagatgatttttgtttcctatttttctgtgttttctgtttttattcaatgaaatatttttattcttccaaaaatatgttaagtgtggcataggaaatagagctcagtgccctgccctctgctcagcacctatccaaatcctattaacataccacatagttcaggttctgcctcctccaagaagactttcctgaccagcctcttgctgctaaattttggaaatacttttgctgagtgattgttcctacattgagtatatttgtcttatttcttcaagtgcactgtgacttatgcaaagatactttttctgttttccatttcccacaaggccaaatacagctgaactcattgtagatacttgttctacaatgggcagcgaatttctgaaaggatagaaaagatgtgaaaatgtgaaaaacagaccaaaatgccatttctcctcactcacatgccccacagtcatatctcaacttggttgtagctctccctcgctgagaggtcatgacctccagcttaatgtcagtgctgtagggccttagagcacatctcctggataacagtgtgcctgcgcatgggctgtgtatttctcccctccttccaaagtggtgagcactttgcatcaagcgcaagaaagatgtttgatgaccttaatagcattagtgacaaggcctccatccttgttgggcacttttggtctgctggtaaaagaaatgttcactctatccccaagagaaatcttcttttccaggaatatacagcaaaatcaatcaagtcttccccctattgaaggctagctactccacccatgtgatagatgccatcaattttttcgtcctctggggaaacagagtcattttttccttctttatcttgcatagtcagtgctcccttacaacacagtaattcccatcaggttttgagaactctgtcttctccctttaagcaaccaccctaccagaagccctcttcagttctttctctttttgctttagtgtcaaattttcaaaagacctgtctattcctgtactccccattttgttaccttcaacttattcagcgattcagtgcagtgtgtatcagcgcagaatttggctccactattctaccattagcttaattccctccatgttgctaaatccaatggacctctcagtgcatatcttatttggctttttgctagtactataaacctttgttcacctcttctttttcgaagcacagtctttccttggctttagtgacctatgtggcttttgaccacctccctggccactcttacatcaccatctctgtacaggctcatctacatttacccagctgatcaatgttgaaacaccttgggactcagcccaaggacctctcttcgtctcgggctgtactttctttcttggaggcctcattcacatccaggttttcatgggacagccacagtttgaaagtactcagggatgtgtcctctgaccaccagagaaatatttgcctctgccttcttgacatgtctcagacgcctcaaaggtccctcttgttcttcctgtgcatggccagtcctccttcaaggacctctgagatctcagcaaatggcactgtcacccctacaggtatgcaagtcagaagcttgagttggccgatctgttccacattctacctgccacactgcctcagcatttctcaaagccatccactcttgttctttacttctgtcacccaaattcaaaccatatcatgttcatggctttcatttttaaaattctggactattatagtccccaaactagtcttacttccatcagcttttgaccccttgcagtctactctgcttccttgaacagatctttgcaaaatacagacaaatcaggtcatcctcctgcttcaaaccttgcactggcttagtcttgcttttagggtgacagggtttggctgtggccccacccaaatctcaacttgaattgtatctctcagaattcccacatgttatgggagggacccacggggaggtaattgaatgatggggccccgtctttcccatgctcttctcgtgatagtgaataagcctcatgagatctgatggttttatcaggggtttccacttttgcttcctcctcattttctcttgccgctgccatgtaagaagtgccctttgcctcccaccatgattctgaggcctccccagccatgtggaactgtaagtcgaattaaatctctttttcttcccagtctcaggtatgtctttatcagcagcatcaaaatggactaatacatagggtaaagagtgtattcactaccatagcctgcaccaccatgcttcacctcatcccactgcctacagcccagctccatcttataccatcagcatccctgtccctaccccctactcatctactttttagtccctctgaagtgtcattctccatccacaacgggcctttgttcattttgtttttttttctctgcatgccacatctgaaatcccttctctcagtaacctaaatcaactttgtccttctcatcctccagttcttagcttgttatcacttcccctgggcagccttcctccaagaccagaccagatcctgctattttatggatcctcaaagcagcctgtacctctccttcctagcccttgtcacctttgtgatttaacatgtctttatgtgttattttgcttctctgcttccttaaataagctcctcaggacagggaccgtatcttttttgctcatcattgatatccttagcacccagcataatgcttggacgaagtccgtactcaatacccatctactgaatggaaaagactttggcagaagaaaatgaagtcaaccacttgctcctcagacctgggtcgagcaagccaccacacctaaatgttcaagttagaatcaagaaagttcatttgaaagtcatgattcaggtttccagcataaattatatgcagttgtgcaaacatgtcaaagtttagtaaattgaatttgtttaatgtaaacaacttttgaccaaaataataacacagctttagaaaaagacattaggcacccacttttgaagagtttgtataatttaacacacaagaaaactttactgtaattatatgcagacgtatacaaaggataaatgttatttacttgctccaccctccataaaataaacctccaaccatgcttcagcttgctgcattaatcctaatttagaaatcacccccgccgaaatgggggtgggggggggcgcatggtgggctctcatcttttcttcgcgtcaaaattagccgtttaaattagaaccacgttgggagcgtaggtgacgccaacgttgcggcaccagtccggggagcacttaaaagtagccacctgaagttaattaaaaccttacctgtcaaacccagtatggctacatttgaaaatctttaatgtaattaagagaagcacattatgggaggtcaagtgactttctttttgaattccacttctaatctgtcgtcaaatggatggaaattgccggccgagggagttaatgaaagctgcatgagcgagcaagggagcaggaggaggggctggcagcctggaggagctggcgggagggcggacggggacccctgtctccttctagcggcgaggaatgagcctgggggagccccaccgggcaacttcccttctgccaggaggctctgggtggggggttcattcagcccctctccctgagcacactgggggcatgcaggagcagggtatggggcgtctgcgcagctccctgcttatcgctaagtgagatctgtggccaggacggcggggcctggacagagtggagccggcgccggccctcgtcacccttcactcagagccgcctgattagcatcagggttccgctcgcctcttgcacggatcccccaaagagccggtggggaggggggcgcttccacgcggagcctcagctgtgcagcgcctgaccccaagcccgtcagggggaaggtctcccaggtccgcagccttcagcaccctggatctggggaagccccaagaggccctggtactgccctggattttcttctgggcatgtgggcttctgggccactaaacccatctcctactgcactaggtaggtccggctcccggagcccccagtgcaatcttaatgccagaacgctgccttttggagattaaatcacttaatgctttgctgtgtgttctagcctgagggtgctgttgacagaaggcagagtttttctctctggttgctgcttctctctctcttttttctttttgcattgcgtttgtctgtatcagcagaggtatctgtgtttgaaaaaggattaactccctcagaatgttgccacttaagttttgcccctgccttggaaactgacatgagaataaacaacatattaagtcttcacagaacactggtaccaagaagtttccaaaccagaggacttaacctccttaatccaggccttttccctttgacttcctcctgttagtccgagcatgggcagaaggcatcagtggggagaggagtgtaaatcttctagtttggaaatctcttccatactccatggaaaacattgggtgtctcctgtggggccagtgtggtgagttacttggaacagaatgggcaatctagtaggcgttgaaatattcagaagcatctcatagtgtcttagaagatccaagacctagcccgatgggtcttctctgttattagaattgtgtggaagggtggcagacgcagttgaggggatgggatgctgagagacaaggcatttattaaaacgacctctagagacttttttttttccactgggcttgaatttcttgggcttggagagttgtcactaccccatatgaaaaatggaagagatgagtgagaggaaagaagatgaggggggaaaaaaccaacctgagagtggtttaaaatcagaacagagtgttggtgagagtcagtttccaagggtcgcctcttcatgctgtattgctttttcttgaccaatgaaaagccccctttttcagatttccccccatttctcatccatagcagaaagggcagtgcttctagaaattgagatgtgtctccaggtaaaagccacacaaggcagtgggaagggatgtggctgtccccagcctccatttgatgccgcgtttctctcccagccacaagttcacaggtaaaagtgaaaagttgctctggacgtcccttccaaagagagctgtctgctcgccatggcaaccttttcctggggtctctggctgtcaagaacggggtgcaaagttcacagagctcagcattgtgccctcctctcttcttgtcccttttttcctgaagggatcgaggttggtttgcagcacagtttaaagcgaagatgccaaatgaaaagttcctcgttttaagttggtgcttatacaaagctgctttgtggtttttttcggcctgtcagacttgtcaggcctagtaagaaaaagtatattgtttccagcacttggattcctttctccctgacatctgccactctgtaaagatgataaattcctgcctcattagccaagggtgtgggattacaggctgacaacacattaatcaccagcctctgtggcaggctgactagcaataggcattgttaacaaaacttttctaatatgtcactcttctctatgacagcctgtaatcaatcattgtgattgacggcgctgatagattacactatttatactttgtgtaatgaaagatagtgtttccacctactgtcatttctgggctagtggtagaggatcagtaaatggaaacaaacataacaacagggcaagccctcattcaccccaaaatatccatagaactaccccaccttcccaagtcctaggcttggcttccacttttggaagtgaaaaagggcccatcctggaactctggcaatcattctgggatgaggggtagtggtgggggcacctggaaggacagaggtaatttggattttcacagagagagctctttgcaaaggatacgatcccaggtattgataggtcgagtttacataggtaggagagtccccaagcagcccctttccttcccctcatcagcttacgtgtgtgcagctgagcgttgagtgcctcctcccctgccagatgagagatgatttagatgttgataaaatatttgttctttcctggctctgagggcaaatattatctttgtttcccataatcgtaaggcgctgcaaaagtcaacagcacccagagcaagtacaaaaccaacactcggagagaagccctttctggaggcctttgccagggcttgcttgtcccccctgaagctcagaaaatttcaaacaggatacgaatgaatcagctgagctgaaatgtgttctgactctcacatcctcggtatttttggagggtcctttcagtcatttttattttggtctggaaagcattcgtaaaggatacaagctgtttttgctttgctggaagttattatttcaatagagtgacaaggaggctcctgggctagcatcctaagaggggagcatctttcctcgtgttggggccatttccaggcaatttggccacaagtgcctgttttaatgaatcactttaaaaatgattgtggtatttaattttccttactattgattaaacacaagaaaatactcctttattacttctttaaggtggttagggagattgctcataggtatataaatcttcatttgactcttcagtacaagcacagatgtgcgattccctgccttcccattcaatgcatttttgatctttgcgtctctgcattatatgtggattggcgaggccaagagaggagagtagtaaggaagcagagtcgtcgtcctcctcctgaacgctgtggtgttgataggcatcagacactttaggtcaccctgccagttggcaaagcaaaaggaacctgagacctacccctagtgaaattgccttagaggcggatgagatgggaggaggtgcagggagacagggagctaaactttaatctctctgtgaagtttgagtgagcccaggatgattaatgagagagcagaccatctgattaagcccctctgtgtcatagaacatgattagtaggtgacagagatggtaacagtatccagccaaacccttgtttctttcacagctccggctgttatatgattaatgtccccaagggctatcttggggtcaggcaggggaacctgtcagaacaggtggaagtgacaaaatgggcagaaactcctaagggggactggagtggtgagggagaaaatggagggggcagggcagccagatggagccggcgacctttctctgatccaagcaggcacagagatcatcgtgggaatggaaacgaggaagaatcacaaaactgcagatgtttcccaggtcctcaatgcatcaagtactgccagctcagacttgtgggaagcacagtgtgacacggcgcgttatcactcgtggtttatgttctgagatggaatgggatggggccactgcaggccctgtgggtatgaatgtgggatgcccgcacctgtgcctgtgtaagcatgagtgtttgtgcaggtacactaggacaagtgctccactctgctgggggattaagtatgtatcaaacgggtagagctgatatttcaatttactgctttctggggccaacacctatacattgtcttgactgtgctacttagaaaagataatatgggaaaataacatggatttacagaattgaaagttttaattctgtaaatttacagaatcaaaaggtttttagatttaaagtgaactgtagaaatccctaattcagataatccagattacaggtgagaaatctgaggttcagagaaggtaatgacttgcccagtggaagtcaagactagaaccccaggcttcctatttccggtttcatatactaaacccttgatgagtctgttggtaggaagcctcagaccttttcattagatgtgagtttcccagcaagacttgagtctttactctccttatcatattccctctttcccttcctagaagcactttgacctcccggtcaaaggtttaaacctcagttgaaatggagtctcattaagtccttttgggcaagcagccttcccagatgtcaactttgagaggagactatgctctcaaggcagccgttttgattgacaggagtcctgagggtagccatttttacattaaagggaaactggtttgtattgagtttcatctggtgagcctggcttctcttcttccacctttgatgccctatgtgtctgttacatacattcaagagtcattcccgggctctaatggggtctgggagaactttcatctcagccattttccagggctctcttgggtaaccagtttccctttgttattcacgtctatccaataactcttgctcttatgttcacacaataataataataactgggttagaacctgggctgggcagtgaccagccccctacatctgcttgatctctaatgcaggagtttacaaattggaaatctttgctagctaggaaaaagatcaccttgcagtaggattttatccataccaacagtgctcgtgcttcagtgagttgcaactgtggacttaatggcaaagctgcactcagtgttatgatcacgaaggagggagaaggaagaatggagattgtattggattttactaaattgtgtcagtgagggagtaagttgaataagagacccaaccagggcatattcataactctgtctcctgacagtggttgattatgtacaattttgatgttgattatctttaaatagctcttcttgttgtgggacaaactgggagatctacctcacatgagggtaaagtacaaaggatactaaaatcttcccagagtagagtccccatgattctgtagcataggctttgggggatcaattatggataaataaatgttcattagcttcagagctctagtatatgatttttgtcatgggtttcacctcagcatcatacagcctttccaggccaagaagagaatgacctagtgctccaaaaacagtcacttaaagactggctctgtggccttcgagtgagttatataaaatacaaccaagatgagactgagtgctttccatggtcaaagggaatcatctaggaccaaacttttctgtgagctgatagaaaaatttgagcaaactttggcagactgatccaagaagatacttagcctttactgtagtattcaggatattgtcagacattctggtgtagtgtggtggtggtgaagtggtgatatgttttagtacagagttcattggttgctttggaggatcatgaagtgcttgtgcctttcccctattgctatataggctgagatgccaaaaattcaggctttcataacccacaataaaacctcatcttttccaagatgttgacccattccctctgtgcacactgctttatggtagagacttcctggtagagccatgctgttgtggaggtgactcccagctttgcttttagtaggccctaaggatactttggggtgtcaccatgactcactggtaaaatttgggaatcattttatgagagaggccacaagcaaatggtgactaatgatacagtactgaagtttgtgaatgatgtacattcatgtaaattagaccagattcactttggctgccttcctctgtaatttcttgagcagagagagaggagtggagttaattaacttagggagaatcacatctcaccttaagggagcccttgggagtgggttgggctctataaaatcatcctccaagcacttgggcagagacatgtttgagaacttctatattaagatatagtgtgctaatgttattacccaatcagagtgtgtgacaaatagtttaatgaagaacagcaaatgttctgggtagcaggtattcctttacttaaaggcgaagatgagctatatttaaaattcaggaaatgcaaacttaggtccatttgaggctaatacatacacaagattctgccttttcatgacagaggaaaacataagaaaaatgtagagtgcaggagacattcatttatcttggaggagaagaccattctgtggccccatcagcctggactcccaagcccagggtaccaagccctcttattcccttttgcattaaaaacatcacaatcatatcttttttatcctgttatttatttttgagactctgaaaatggatttcttttgtgggtggttgtttaaagaaaccagcacagaaaaatcagcctgtgcaaatacactttttttttttttttttttttttttgagcagtgattttctttttgtagttcggaacttgaggcgaatgaaggtctccctggtgccctggtagctgcagcccctcttttagcattttttcaaagggcgcaggccaatctgcccataatgagcttggaaagtgaggatgaagttcctgataatatgacacaaatttctttacttttgctccttattttatcttaattagtccctgtagaaaggattgatttttgagaggcttgtagtgaacatctgttggtattcctggggtcattcttagcctgtcctgtgtttgacatttcttgtaaaagaggaggcatttgttcatattgacattagctgcctctgtatctctcggtggtacagatggtctgtgaataaagacatcaagctaataggcaagatgacaagcttcaatggagccaaggctcctcacacttaaatggcagggcagcatagattgcttctgctgctgaggctggggtctgtgggtagcaaagcgtatggaataagttaaaaatgaagagggaacctggaaaatgactagaaatctctccctgaaactgcaggggctttttattactgttttcattattattactggtccatatagtatgtcaagcttccaagatgtccagggtcagggagagaaagtgaaaactgggttttctgcccatcctgtgaccatacatttctgtcaaatgggcatgctaatctcagaagggagctattgttctcactttctggggaagtacattcatgttcctccttccatcagaggacagtcactcttaagtctagaggctgattccccccaaacccatgaaaccatgttttcccaagggacttccaggaaagcagcactctggaactttgtaattctgtacattcctgaggttctgggctttctccaaaatgcatgtcccagtttggtataataattcgtcatggctttggcatgatgaatctcaatttatgtccatttatattttaatcatgaaccagctattaagacaaagaggtttttcagttgattcttaccaatgtgaaatgccatatcttatgttacctagttcaagtctgaaggggagcctcccagttctggtgttgggtggataagccccccatttgttagggtctttttatcagtttctgttgtattcttgcagcttctatcttcccagatgctggaatcctcatatagagcagccccctttgactcaattacctgtatagcttttcttaccttctcctggactctctttgtatctactatacattctttattttccatttgtacattggtgacatgtctacaggtatgtgttgatttttttttttttttttgagacagagtctcactctgtcacccaggctggagtacagtggcgcaatcttggcttactgtaacctctgcctcccgggttcaagtgattctcccacctcagcctcctgagtagctgggactacaggtttgtgccaccacaccgggataatttttgtattttagcggagacaggattttgccatgttgggcaggctggtctcgaactcctgacctcaggtgatccacctaccttgacctcccaaagtgctgggattacaggcgtgagtcaccatgcctggccaagtatgtgttgatttttaattttcatactgcgccatgtttcatggatggtttgaggtagcttataagaataaaaactataaaacaacaacaaaaataggatcttaccagtatattggaaaatatttaaaaatgggatgatagcataagaaatgctgtttgatgatagaaagaccaaaacagtatgtgctgatcctcttaggttggtgcagattaggattattttgagcttgtacataccaaggacttgaatcaagaccaatagctttatgtgagtgaggtaaaattagctctggaactgggtaggtagataaaaacaatttgtttcttggttgattgttctttttttttttttttttccaaagagacggagtctcgctgtgtcatccaggctggagtgcagtggcgtgatcttggctcactgcaagctctgactcccaggttgacgccattctcctgcctcagtctcccgagtagctgggactacaggtgcccgccaccacgcctggctaatttttgtatttttagtggagatggggtttcaccggattgctttttctttatcttagacattagttgatattgaaatgtttgtatgtgttcctcacaccacccgcacgtaggatctcaatttgccagctctaggaaatgggagagacctatctaataggtatctagtatcttcaagaaggaggaggagctatggaggagaaggtgatagggagagaacaggggtgagtagaaagaaagaggaaggagaggagaaaggagtcctctaattcgcctagataatggtaatattaatgagatactctagttaatgaggcaattgtctggcagagggcgttgttcagtatttccagcccatttctgtgggcttgaggcaccattatgagaagctgaatcagatgtttagaaggaggaaaaattgggcttccaaaaggctgaggccagaaaacagtcaatccacaattgtctgtcatctgtttgatgcagatcagatggggacatggccctgccttggtttctccattgggactgagttctggcttcatatttcaactctcctgacacctgagagggttgtcatgaaatgagaggaaacttctccccttaatgtcattctcccatgccaacttggttttttgcttcttagtcactgtttctgttttccccagtacggtgaattcccccaggatggggaccagatatccagtattagattcagtcctcctccatgtggagtcaacatctttttgtcagactgggagctccctaaagacaggaatcaatgtattttatatcattttaggagcttctcaaagaaagcaattattcctctcctcctttctcctctaaattctatggttcccattggggatcatgcattactttattccacaaacatttataaagacctggtatgtgccaggtactgttctaggcactggagatacagatagactgagttcctgtccgaggagcttgcattttggggtggaagtggtaagagagacagataataagtagataaataaatatgtgtcaagcaggaggtcatgctgtgacatgtaggatgatcagagatggactttcagagaaggtgacatctcatgctaagtgatatacaattatttgggcaggtagatgagagttccaggcagagggaacagcaaatgcatcttctgtcatctctagtatctccaagggagtgtgagagaccaggagcagcatcccaggaggcccagggtcacctgatcaccttaagtctcagaatcagatgctcagacatctgctgcggcagattgtctcctgcttgggctgtgtccagtctcggtgccagcagcccttttaaacccatcggcaccttcaggtgttttccttcccctgcctgtctgtgaggtcttttaagactttggaactgggcaatctaggtacaaatcttgtccctgccacatgatggtcgtgtgacattagggaagtcacttaacttctttgtgtctctgtatatccttatctgtaaaatggagatgataattgtctctagttctctctagagattaaatgagttcatatatgaaaatgcttagaataaacctgcatataataaatgctatacaaatgttagccactattattgttgctgttgctgttaacttgttttagcaaatgaagcatctctcttacaatgcaaagccggcctctttcccagttcatcctcctacttacctacaaaatgagggatggagatgaacatgaacatgaactctaaggatttttttgttaggcttgcctttctgggttctactctaagccacattcagctcaccccaactctaaggctgcaaagctgattcggcatttagtagaccattttcctgctcatggtccatggagattagccttttctctttagctctaagttccttcagggcagggatgaaggttccacctctgttatgtctcctggatcatctaggatgatccgaaggattcccagatctgggcattttattctgtgcttattagggatttcagaaaaatgtgctctcctcatgtttggcatgcaatcttttcaacagtacaactcttcattctccatgctatcctctggtggaggcagcatagggcgctggctaacagacctcagacttgggatccacgtggtttgggattgaattctactgggtcagtgactttggggatattaatgatccctccttattaagaaggttaacaaggcaaggcacagtggctcatacctataatcctagtactttgggaggccaaggcagtcagattgagcccaggagtttgagaccaccctgggtaatatgactaaactttatttctaccaaaaaaaaaaaaaaaaattagccaggtatggcggctcacacctgcggtcccagctacttgggagactaaggtgggaggatcacctgagcctgggaggtcgaggctgcagtgagctgtgattgtgccactgcactccagcctgggcaacacagtgagaccgtgtctcagaacacaaaaacaaaaacaaaacaagtcaatatatgtaaaacacagaaaggtgctgatgagtggtctacaaatggaaaccattgatactgttattgttgttagtgttcttccagtgtgctttatacataaaaggttctaaactgtaggttaggatagtccttctctgaatatatataatctgtgaaggaattctttcactcagaggtggatgtgaggcagcattctgcagcatctcagaaactggtgctcattaaggcacaggatcctggctgaggccagtggcaaagcttgcttaaagatactttgtcatctttccgtgtatctcaaactctgtgccatgttaggggatgcggcaaatatttgcagaatgaattaataactggttgaaggatggatgggtgaaagatgagcctcttctgtcttattattactattaccaaagaggcaacagtgctttagcttgttccttcccctccctgatcttttctctcccactccaccttttgaaacttttgttaatcttgctttcttctaccttgtctcatttccgccttgctttcctctctcctctgccacctctcccatcgtctctaggcccaaccatgactctctgtgtctactatttgtcgcttctgccatcggtatcaagtactaagtatccctcaaatccagagtattcacagtgcagtgacccagatgaaagggggttgggattttgctttcttcccttggtaactatttctcaggatgacccagaattcatttgcttaggtaacaagacaacgaggtccccctccttcactttgacaccatctgtgtcagtgttttgataacagtccttgccaagtgtatcatggctgaaattgatgctaccaggacacaggaaactcacaccttttctcaggctgcctttctttcctctacacttactgctgtttaaatgtcaccactcttgaacaaacagtggagtaatgtgtcagggacagctaatgctatattttggtatgttcttatcaaatcaaaatgcctctggcaagctatttgcctttgataaaaagaatcctggtcttcctggcagaactcaatagtaattgaaccaggccacacccttaggacttaggcccctgtgggtgtcctgaatccagccccttggccacacagtagggtttgggtcaatgcccttagcattaacaaggctcagtagtctgaattcttttcagatattgactgctccccacgtctctgagaaggactcgcttttggggcctcagtttcaccatttggacagtgaacttccatgctttgccagccgattccttaaataatctcaccaaccatctgcagataattgctttgtgggtagcttatgaacagcagctgggagctgcccagtccccatcatttttgtctcaaaagcagggtttgggggccatactgtcagtagagaaatgtgtgctataatcattattacttatgacatttctacttaactaagaaggcatttccaggaaatatcttttaaatcagtaactttaagaagctgacgctcaaaggggatttagaatctggattatttttctgattcaaattatcttttcttttggcctttgaagaagcaaatagatatttatttctcttgttccctcctctgcaaatgcttaattgattttattcctgtcagctgactgcaatagaaatcgctgtttccacttcttcctgttaacaccttttctgcaggggtggagggctagggggaagctgggacaggtgaatgtcttcttgcgttcggctgtgttgtgcatggagaagatttggagaattttcattcttccaaaattatccacaacactttgaaatgaggtgacctcctgttcggcaaaatgttgatatgatagtatttatgaggacagtttgctatgtttacagaatgtatatttggaagttgcatgtactaattggattttgaatatttttgtttctcattgtatcacacctgaaatgatgaaaggtcatttaataaaaaaaattgaaccattgatgcctgagtggctgcccagagtaaaattgcctaccatctgtcaaggcaggaaaccagagtacagtgaaggtagggggagaggctcccaaaaggtggggtctgtcacctagaggaggagggcgtgatggctggaaggggtagtctgggtttctggtgactgtgtcccacatcaggactgcatgcagctggagggacagagcttcaagcaagccatcccaagatgactgtctcgacctcctcagtttctgtgaagaggacatcactgtctactcacagagcataaacccagaatgttttgtctgtcctactcctgtagacaattcctcccctcaccagtggtgaaagagccaatacaaagtcctgactatatgttctgacttttcctagggggcttaaggaaaggcaggggagtaataagcctctgctttgagaagccacctccttttcccctttgttcttggatagctatggaatgcaattatgtgcatttaggacctttcattgggctttgacattcaaaccacacacatgcccttgcaggttgaagagagaggggatatcctgactaacacattcccggactgcctcagagatggagcttcatgagaaaagcctgctctaggacttgtgtggcctcgagagcattgaggttgttcatgatggagctggcttttccagttgcctctgaacctaggatctgctttctctctccttcccacatcatagattgaatactactctaatgtaatgactttggctttttgtttgtttgtttttattcacaattgcagatagcgcataggcattctgcatatatcaatcttagggttctgtttgttttttcatgaaaacattgctttgttcagtgccctgtggtataacctgtggctgcaggaattatagaactgctggtaggattctttcagatagcaaggagaatattgcaatgaaatatagagaagaaagagtccgctcctgctggggtctttcatccagccaattgtttcccctctctccactgcctttctcctctctacatctgggcttctgtttctttttgtgtttctccacttctgtacccacactatcctttttccatcttgcaatacattttgttctttttgttgctccatgtaaggggcctcatggattgctgaccagcctattgcaggggttgcatttagctcaggctttcctctgagccatttagctgtgggcagaattgtggagttgcatgttaaaaaccacaagagagctgtggttatgacaggctctctgcatggaataagaaaagaacaatcttgggcaaaaggctctcagcattcttcctgatagcactgccaaccaaaaaccaccctaagcagattgtgctgaaggttggccacttctcagtccagatacctggctgaatgtttccctgaaattgagcctggggagcagattttgacttttcaggctacttgctcataaagccaaccatgtggatacaaaattgctcacataggaaatgccaagtggatgttcactgttgcagccattatgagcgctgacattgttgaggggacatcaggatcctgtatgcctgcctagccactgtggcttgtgcaagtagaaataaggtcattttttaattcatagcagagttgccagatgatcttaataagtatgttgtctcattatttaaataccatctcaaaaaatgcatatatgtgcgcaaatatttatacacatgcatgcatgcatacatgcacacacacattcatagtagaagcactcttaaccaacttgcatttcagcaacttggcgtattcacccacgccagccatcttcctgcgaaatatactggctgcagcacatcaccctacagatgcatggcagggcacttctgttcccaccaggtgaactgtatgtttaccaagtcagctgagcctgttcccaaacctacttatgttagttgtgtttatattgtaataatgtggtttaattaaatgttataaaaccaatgaaatgaaagagtgcagagtttttttttttttcatgaaaactaaggtgaatgtttggcaagactcagtgtgttttagttttttgaatacactcaaccaagtgtagataaggcagttgtaaaagcttgggaggaaaaaaaaaatcataaaattctagaagaagtctgcactcagattgccttaggagacttttaaagttctagttcctctttaaagaaaacaaaacaggaaattttagagctacatagtaagaatggtttgtacaaagtagtccatgctaagctttagtcaacagatccatatgcaaaagaaaagacctaagcctatatggaaagagcagcaaattaatttgattcacatgatttaaatcaaaatgtttacatatgaatgtagcattttaaccaacttaaaaaaaaacaacaacaacaaactagccaactactggttcagatcacagtgtataaagtgcttctgctcactaatacttgcccataaaatcaaagtctggtagttttgtttagaggtgaaaggagagaattggcaaagaaattaattctccaataacttgcctggattccatttttcttttgccatggaattcaggttctagatggtaacaggaaaagcaggcatttccaggtcgggaaaagcgggttctagatggcaacaggagaagcagaaggtgtgtgtgtggaggaaaatgagggttttcagaccctgggacagctcccaagtccgccgcagtgttcctgctggatgcaagccatgggggcagcacagatgggaaaccctgagttggtgtggatgggaacaatgaagagcaggaggctgaagttctgtcaatgcttttcaggtcaagagtgggaggtggctcaggaatgtggcccctgacgtcagcccgtgcaactcttgtcaacaaagagagctcccagttggagaaattaaaagcaaactttgactgggaatgtgtgggaagtggtagctcagtgagtgaggccagatgccacatcagctcaaagtaaagccatgcacttggctttactgatggagatgatggatgtttatgatccccagtgtgaaaaatccttgcaatgagatccatccctgaactcctcttctcccatctgtgaagatgcccaaagactctagactggccttggagcagtccctgggcatagcatgccctagagtacaaggcgagggacctttttggttgacacaattccccactgtctagcccagagctcatcagggaggcaatcattaaagacgtgaaagcgttgagcaggatgtattctatctaaggcaaattcatgtgctagaggacctcctggctgtgttccaaggagcgtctaccttattctaacaattgtgagggatactcagtggagtccaattggagacttatctatcctaagtaaaataaaccctctgttgcacatatgaaagtgataaataatttaaatacaattttaaaatattggtgcttctcagcatctcccactcctcatggttctctctttgacacctccagagtcccctagaaagggtgactttattctcaagcatcattccagtgtgcttcctaaccaataccagcagtgccagggccatccaattgacaagtgaaccctgggctgctggcccacccattattgtcactcatctgtgggctgatacccccttcactttgctcaagctcccagcttggccattggtgctcctccatcctgcagtcctaccccttagcctgccacagcccttgacttttcaggcccaccttcagccaggcctcactctcctacttctggccaggctgttgcccaaattgccatctccagtgggtagaagactatttatagctcccactgcaaattggttcggagactgaacgctggtctcctgaaatagacctttagtgtggacagagctcatggcaaaccttcttgggtgtagggtactcagctctgtccccctctccctagaggatgtgcacatggctaatgctacaggagtgggggtgggttctaagaaatacccagaaccactgttcactcctaccctcaggtccttttgctaaaccaggcttgtttgtggatcttccttccctaggagtgggcctcttctcagtgtggggttccacagttctgctctttaccagtggggttctgtttctcacctttccccagcacccacacttgtatatacctacacacacaccccttccactgccatgccttccaatggtctgggaagtgttttagtgggaaatagtctaaagtagaagttcatagcaaggggtcttcaaccagactactgggattcaattcctagctcttctactctctggctttgctaccctgggtaaattacttaacctctctgatttcagtttcttcatatgtaaaatggggtaataaccatatttactttataaaggctattataaagaataaatgaggttttcttttgtattttgaggagtacctggcatgtagtaagcccttaataaatattaactattaatataatatctgaacaccagtcactgtggctgctcaaagtttttttttttttttggacacttcttgactactgtgaatcagtagatacaaaagatactgggtgcaggacgagttcccagcttcatacccaatctccacttagactcatccagaatattttcttacacctctagccgtaaatattcaaaaattgctacatatgttgctagcccatcaagttattagtaaggaaccccatttgggtaggctactagtgtggaacctcacctctgttactctcagttactctttgtgtttaaaatgtcttagaattctttgtatctttaaattttaattagggattgataacaggttctgataacttgtaaatggagactgatcatttgttagcctgtgttttgatacgtagactttaaaaaaaagaaaaacttcttcggtcagaagctgttgttctgtgaaactagaccagactgtgttttggcttgtgtgagaagggaaagcatattgtttgtaggtgaacagtttgcacgactattgtgataatctatcctgtctccctgccttctgtgtctacccagcttagcctatctttttttttatgagacgaagtttcactcttgttacccaggctggagtgcaaaggtgcgatctcagctcactgcaacctctgcctcctgggtttaagcgattctcctgcctcggccttccaagtagctgggattacaggtgcccaccaccatgcccagctaatgttttgtatttttttagtagagacggggtttcaccatgttggccaggcttgtcttaaactcttgacctcaggtgatccactcgcctcggcctcccaaagtgctggaattacaggtgtgagccaccatgcctggccccacctagcctattgtatacaatgcaagtggagtaatcttccaagggcatgattttgattatgtattttttcattccggaaagcagcgagggccaccccgttgcctaccaaaaatgcacatttatggtccatggcaacctgttgcaccttaatgggtgagagagctgctctttccactgcccccttcaccatcttggtgcttccgccgaattggctgactcctgcttgtcacaaatgctttttgccttcttctgtctctgcctttttagttcccacccacccactttcctattgtatccttgtctggaacagcataccacattcctgtgcattgttcaggactcaatgtaaagccacttctcccaggaatctttccctaattcctctcagccaaacagaatcacccctgaggtgccatagcccttcatcccccatcacgtgggtatcatataccatttctagtgtgaggtataaggatattttcaatggacatttttatgtttgaatcttgtatatacctgcaattatcactttaggaaatagtcttagaaatatttaagatctttgatgcatattgcaaaattgccttttaggcaatattattccatttattctctactgtctgtgtattggggcccattttcccatattctctataaccctgggtattattttcttgccaccttttgctattttgatggtttttttttttaaagaaaaacctttgttttaattcatattgcattgctctaatttctagtgagactgaacatttcaaaaatgtgcttattagccatgcacattctctctgaattgtccgttgacagggcacttgacactttatatcatagtagttttgtgaacttgtcagctaccaaggatctatacgacaaacagctatactgtcagcccagctactgtgcttagaacatgataggtatgtactaaacatttgttgaaaggttgagtgaatgaatatatatggctgatgatggttaatgttccttaagcatttaaaaatgtgtagactctaatttacctccagtacaacaattcaagatgcaaatcttgaatgcaccattcagtgtgatcatgacagtgcctttcacttagtaagtcttccacttgtgaggttggttaagaggagtgtgaggttagatttgcaaacataaaaacctctggggtagggaggtcttttggtcactctctatgatcctggaacatcacgtgctctttatttatacttctggacttcaccaaaatagaggtggtgattttggagcccaagaagcaggaaggcagggtgagagcagacctgtgcttgagagatgtctgcttttcagaggagatggtgtagtgacaacttcagggactgatgcctggctattaggatcgagtcttcttagatgtcagctcatttccttgtagaaaatgaaatctaatgaaagctggtttatctggtattccatcaagcagaacattttttattacatcatattcatacgaatgaccctaaggcacagcaagatgatgttcagggtcacattggagttaaaggtcttataaattatattgtcattcttttgaaaattggtgattgtggcagatgtggtaattttccattcaccagaatgcctgagttaccaaaagcaaagatttctgcagactgggaaagttttgtgggagcgtgtatgtttacatgtgtaggtgagcgcatgagtacgagtatcggagtacgagtatcggaggaacaatgagctggagtccactagagagtgaaacttacagagtcttgaccattcatcattctgattctcagatttcaccagctgacaagcaccttcttttttggcggggggggtcagagtttcgctctgttgaccaggttggagtgcagtggcactatcttggctcactgcaagctccgcctcccaggttcacgccattctcccgcctcagcctcctgagtagctgggactacaggcatccaccaccacgcccggcttttttttttttttttttttttttttttgtatttttagtagagacagggtttcaccgtgttagccaggatggtctcaatctcctgacctcgtgatccgcccgcctcagcctcccaaagtgctgggattacaagcgtgagccactgagcccggccaacaagcaccttctaagggtgacttcactttggaattgtttggttgaagcaagggaagtaaggaaaccaaaacctcttcaacgctatgctaagtgttacttaatctcatttcataaaggaaatatgaggctggattatatttatttcgtgtgtgtgtgtgtgtgtaaattttcttaagaaagcagtaagtggttttttccttgtatgcaggtagcacctgccaacctgacctgttgacagataattgcttgacagcctggcctttgatgttaagcgtcacttaggcagaaagaaagtttccctgcacctccctaccagtcctgggtggtcttgtctgctttccttccccagaaccttgcccaggaaacccatgaattcaggcccccgggtgcaggtagggtcagcaaacgccagaccactccccaatgtgtggagagcgaggaggggcctgcaaactctgcttaaaacaaacaagtgctaaattaaaaagaatgttaaatacagatcagctgcctggctcctgacagcagatttaattcttccctcctctcacctgatggagcttcgcctgcagggtttgcatcaattactcgacgacatgtggaaaatgattgatgagctgcctgcggcactgaagtacactttgtcaaccgctcatcatttatacatcttatctctgccagaacaaaagataggacaacctcacactgaagttggggatgggaaggggggagatgaggatgggggtgagggaggcaagtcaggcaaagttgttgggtgcccacagggacgagcttgggtggtgaggcccctgctgttgcctcagaactgtctggtcagtcagctctgccacaggccctggctttgccaaagctctttgactgtcctcacctcccccacccccaacaaagtccaggaacagagaactgcatgctgttttaattacagcataatctcagagagctttcgaggcactgcagccactctgcagctgaccctttgctttaatcaaccactcctaaggcagggtttgtaaccatccctgacaaagatgaatcacggcccgtggatccagtttctgagagaatttcggggggagctgcccaggcagcagcggctgttggggccagcttttgggaaattggggcatctgatgatggtgagacttggcggtgatattcatggttttatttcaagccatgttcccaaggccggaatgagacccaaatgtttttgttcagattgagatggaaggttggtggtgatgctgactccttgtttgttccccagctgtggccttaggactaagacccctcctaacatgggaacaaaaaatatcacctcgcatatggctgtcttctctttcctggggacactattatagccacaaatccaggtgatgacctaacaatcatttctaggcaataactgctgaaaatagctattttattatgagctgatctctattaattcactctctattaaaggcatcccatttattgatttttttttctttgaaagaaagggtactgacaaatataaagtcaagtgacctagttatataatttgagtgattgacccaacagattccttagtaattggtcagggggtggaaaggaattaagttagaaaacttcaaccttataatataataggatttccctccaataaaatttgatacattacttacaaattgctaaataataaataagaatgaaaaatgaacatacctactgaatgaattataaaagcaagtaatacaactatgaggcaaaatcatgccagaaaagaaatagctccacataagagaattatgaaatggaaaaaggactcaatacccaggagaatatttctgcggcctttgaaaatttaaaaacagtattttgaactcttccaccagtttagttggtattgttagaggaaaggttttacctatgctcaagaatttgtagatgagataacagtgacaggtaaataatcatcatgatatcaaatgtttttataaaaatttcatggagcatgaattatactatacagaaggaccctcttggaccagaagagaagggcagccactgaggatctcataatgcccacaaatgtgctagcgttggcagatcatccatagtgcgtctctgttctgaatgaaagaaagcccttgcaggcttgatgaactgcaaagggacagcaccaaatggaggcatgtggtccctttaaggtggaccttaagatttgatttcagatttaagtggtagtcctatgcaccacaatgaatggagttttacattttttgtgcttttgataacccttcaaggcttctatcttgggaaatggtcacctatttggtattcattttgaaaggtttgaaagctatttgtattattttcctaaaactgctgtaacaaagcacaaccaactaggtggtttaaacagcagaaatgtattgtcttacatttctggaggccagaagtctaaaatcaatgtgtctgcaagggttggttccttctgagcgctgtgagggagaatctattccattcctgtctcctagctcctgacagcctcaggtgctccttgacttgtagatggcatttttactctgtcttcaccttgtcttccctctatggatgtctgtccttgtgttcaaattttctttcttttttttttttttaaggacatcagtctcattggatttgggcccatcctaatgaccttatgttaaattgatcatctgcaaaggccctatttccaaataaggttacactcacacttacctggggttaggacttcaacatctttttgggagaacacaattcaacccataattgtattacccaagaactttaattcgagagattctaccttcagtgctttatcttgtagtttaaggcatagattgttatcttgaagcaggagtcgtgtcatgtctgatctaagagtgggcatatagtaactacttgataaatatttgttaaattaatgaatggatgagactttaatcttgaacttccttggaaaaggcatttttatatgacatttgtaccaggaaaatttactaatttacaatttatgaagtcaatgaactccagagggacacaaaagttttagcaaaaaaggctttctttcaaaaataatatgaagctcagagtgtggccatttatagggaatcttctttttgtgaatggcactttagagagaagaattccctagataattctgtttttgcagaagtcagtgccttgtgctggatttattttcttgccaatacattgtcacttggggaaaaaattccccatggaaactttatattataagtttgttaaaactggctcaatattgtttatattatctggttcacatgctgatatataagggagattcaatattatgagtaaactattacctaatatgtgcaaatgattgagtcttgagttagtaaggaggaaggttttgtgtcttccagaaacatatttacatacaagtgaacttttaaacatattaaaaaaaaagcaaaaatgactatatttgataaaaacttgtccaaaaaatgtagatatagcaagtttagagattaagatgtttatttgtataaaatagatgagcactttttgttcttaaactttctatatttatattttacataagtttttaaaatccgatacagtcaatatttgtttattaaaattatatgatggaccatataatataccaggctgaggaggaccaagcgtatcaataccccaaggaagcacgtccatgtgggtaatgttaaggatacctatatgtcaggccctaaccaaaggaggtttgtggaacttggagagatccaggaggtaacaccaaaaagctgcatttagcaatgcctgcctagccctcctgtacagctcatgttattttgttgccttaggccaccttacaccaaaccattcctatctccatgcttttgtttatgctgttgcctccttttagaagggccacgctccaccgctctgctgtgttgatactaccgacccttcctttagttcctgttcaattcccaagccttctgccaagccttcttggacattcccatcccatgctgactattccttaagctaaaacccttagagttaatatgatacacttggctacctcattgtttcatatcagtcattcctgtctctagctataatcggctcagccaaggaagatatatttatatggacaatgtctttgtgccttggctgtaaacagtgttgaataattaatctcacttgatgaggtcttacttaatgatagcctccaattattcaccaagacgaggggcaacgatgcttgtccattgtctgtgcaggctagactggaggaaagggccttggggaggaacttaaggtagatggaatttgctgatggaaatgttatttacttgatcaaattttccactggcattggtacatacttccctaaagagggttaaaaataagaaaggccctcctgggagtcaggagaagtgatgagatgtgctgtagctaggcccttcctttgtgaaatggagtttatgctatagccagatgtcacaatgctcaacaaatgactgaagtccatcgtaaacaacaccaaaaacaacgaaatgcatttattttaaaactactattttgaaaaaacacagtccctatggcaaaaaaaaaaaaaacaaacaaaaaaccctaaactttgacttggggtgacaatgtgtcggaatcctggcaaggctgaatgtccctttaagagacttgatcagagagggatccatcaacatcccaggggttggctggggggactgtgattctaaaattaggaacagaaggaagaactgaggagcggtgagaactaaattaggagaatgttttaggaagattataatttcagggaggatagctcataggagttgtgtattgcccttttgcaactgtagacattttttaccttataattccctgtttaaacctggacaactttaattggggattaaaaaattatggctgaaacacagagccatgttctaatgatgaagggctgcaatttacagaccaattaggatggcatttgttttcattctgcagcaactttttccccccagtgtacccctcaataacagcaaaacagattcctgggtccaaaagtggttttccggagctgacagctgccatatgcctttggctgacaggtgggggacaggttctggacagcttccagagaaccactccttgaattttgcccattttgtagagccactctctctgcaaaacaatgccatttaacttcaagctctgacaccttgcctatttctacttcactataaataaacctactccccccatttgcttgcctcccccaggtcaggcattcctcaattatagtcttaaacctggccaagcgagaacaaatggtgaccttaagttatatcttaaagtcctgcctcatattgggacgcagagtaagtttttttggcattctctttgacaggctgcttgtagatagaacagttttccataaggaattgaaatcatacatcaaatgtattgttttatatgtaagccactggagaccaatgaaagcagttggtagagcccaaataccattacaaatagatttattgtagtgtgttttctcccacctttttctagaagttattactttaatcttaagaatttatgtaagtatgcttgtggcttttatatggtttatgcattcactttggagacttttagctatttagtggcgaggtgtttaaaacaagtgttatcaaggaaataattttggctttacatcattttttttatatttgcctctgaatgctacatatagaatagccaatcggcaatataaaagagttactgtggatgtcatggaaacttatctttccagtgccctttagtttggtgtgttcatctgcacctccaaaaagcaagcggagataaacatgctgtattcctttgctgccaaattagaaaaagctctgtgccttccttcctgaaccgtttcaaagacagacagagaacattagacttcacagcaattaaactcactgtagtgtacatttactaaaaggactggaaatctttttttcagccagccccacagtaacagagctgttagaaaatttaaaaagaaaaatcctgaatgatgctgttagtagataaattaagtgatcttgcaagacccttctcatttattatattaatacttcaactacatcatatttagttaaaaattttttgcatattatcctacaatttaacctgtttagtaatttttttttcacaaaccccttttaatttaccaccttcctctacacacgcacagacgcacatgcttacttactctggtttcaaatattatgcataaactgatgttttgatttggtagccataatttctaagtctgttgatagaaacttgtcaatcatttccaaggcaatatgttgccatctaactgttttgatatatgtgaagctcttgtggtttgtctagttcttataaaaatactgcgtatcccctttgatccttcgtgtactttcaaaacttgatactggtggggaacttgactcttcagtttcttttgaacttgttttagaattatgacagtgtttttctagtacagaaaagtagacacacctaggggacccaaagagacctgactgttatgtcaaactaagagtgcacgtgttattcttctgacagttattgagattaaaaagcaggttagcagttttcttagaccatatcaggccctgaagaggagacagtggcttttaaatctctctgtggagcatgtttaggagggacagtgcctctctggggatggaggtgccttccagttcaaatactgtttggaaagtggggtgactgaaatcaattttctgaccctgtttgtgtcatcttccagaacacaaaggactcttttcatagacttttaagtttaagctctgttccaatctgagccagtctccaccctttggaaaccagaatatgccaccccaaaatatgtctctctagcgtaaggattattttgagctgattatttggaggtctacagccataggagaagcgccgacaacagaataaaagttaccctgttaaaagggaaatttacatctctcaagggaatttccattcatgaaggtggcttctgtctgtaccaagaaaagaaggctgactgcatcaccagagactcctttcactggagaaggtgccagctgaaatctgcagaacaaaatctgaaatctgaaatctgtttttgtggaccatacttcacctgaatacctacccagtatatgtctccctccactcccacccaacatccttctttctctgtttcatttcaagatggtatttaagcctgaactcaagccacctttttaagatttgctcactttttttctgggtatctcccttgtataaatgagttatcactggagctcagaaaacagtaccccaaaggatggcactttggcagcatgggaactttgaaatgaagcaaatgaaaagatcttagaagcagcttcagaaccaaagactttctcaccttctgtttctctccccaagtacagggtggaactctctctctctctctgaagttctctcatttgaagcttctcgagaagaatgaacacaattgccttcaatctcctccctgaaatttcattagccagaaaagattaaactcatattgcaggaaggaagactaaggaatgccaccacacctagacagactttgtcacaagctgtttgctgttctttggtcccattcagtttccaaaaagaattatttagaaactattgcctatttacaaattattctttgagtccaaccaactctcctaaaaatcatactcttttcaaaattgcctacattcccccatctccctctcccctaagaagagggcagtatttaagcttgaaccatctggtccttctttgagtcttgtattttgtatggctcccatgcacaccagcacattattaaatgtgtataccttttctgctaatctattatcagtttctttcagcaggctcaaactttcagaagaggagggaaaaattctctttgctcttatatcacacatgttaataagcttctatttgttcttctctgttaatctgtcttttgttatgggggtccattccaactaagaacatgaagggtggagagaaaatgatttttcctctcctataaccctttttggcagcaatggattactaaaagattattttcaaagcacagttttaattaatactttgaaatacacctggtaatacatactagtagctggcgcagtgcccttcagttgagaacctcttttaatgtctagttaaagatcatgtgtaattaacatactgattgttatagaacaaatgaatttagatatgtatgtcaagtttgtacacctaagtaggttaagtactcccacctgatgtgtctcatgctattaatttgctgagtaaacactatttttatagttgaaagatcagttccattccagccattccaaattagttttgttcaaactaatgagaccttattaaattcgaaaggtgatctagattggggattatagtcttgtcacaaatctctctgaaattggacatatatccagctttcaagccccttggtccatcagccccaaagcgtaattccttctaaggtttgcaaaccatagagttttacctgtacctttggtttttgctttttatcatcaacttgacttcaacataactgtcctcctagttattttctgtctcgttttaattgttttgtgcagaactttagtttctttgtcttttctaacttccactggatatcctgtttgaatcgtggatgcatttacatgttgcccccttacctagattctactcttgactcataatactgccccacttgggctagttttgggagaagcccttatctcaacttttcaccttgtctctatccatagcttctctgtggtcctaggctgcaagaaattttctacctcaaggtcaatactggaagacatctttttctgctttaagatttggctatcccctaatgtagatgatttttttctttcaatggatttcaggtgcatggaattgaattaatcataattcttggtttatgacacactatcaattggtttatgtgtaacatttataattatatgtgtgcatttacatagtcttaaaaatgcaatgaatgaaccaacccaagaattagaatatagataataacttatgtttttctgtgtggtcctcttcagtgtaatcattatcttgaattttgtgtgtaatatgccatttcatttttaaaatatttaactacaaatacatttatgtacctaaataatatattgcttagtttggggctgtttaaaactttggtaaaaacaaagcttgtcacgcttgatttttttttctgggatttacttttttcactcaacattgtgttactaaacttcatctgtgttgatgctatagcagctgtttctgcattttcaatgctgtataatattccatcatattcaagtgcaacagtttattctccagaagatggtcattatgttattatctttattattattattattattattatactttaagttttagggtacatgtgcacaatgtgcaggtttgttacatatgtatacatgtgccatgttggtgtgctgcacccattaactcgtcatttagcattaggtatatctcctaatgctatccttcccccctccccctacccaacaacagtccccagtgtgtgatgttccccttcctgtgtccatgtgttctcattgttcaattcccacctatgagtgagaacatgcggtgtttggttttttgtccttgcgatagtttactgagaatgatggtttccagtttcatccatgtccctacaaaggacatgaacgcatcattttttatggctgcatagtattccatggtgtatatgtgccacattttcttaatccagtctatcgttattggacatttaggttggttccaagtctttgctattgtgaatagtgccactgtaaacatacgtgtgcatgtgtctttatagcagcatgatttattatcctttgggtatatacctagtaataggatggctgggtcaaatggcatttctagttctagatccctgagaaatcgccacactgacttccacaagggttgaactagtttacagtcccaccaacagtgtaaaagtgttcctatttctccacattctctccagcacctgttgtttcctgactttttaatgattgccattctaactggtgtgagatgatatctcattgtggttttgatttgcatttctctgatggccagtgatgatgagcattttttcatgtgttttttggctgcataaatgtcttcttttgagaagtgtctgttcatatcctttgcccactttttgatggggttgtttgtttttttcttgtaaatttgtttgagttcattgtagattctggatattagccctttgtcagatgagtaggttgcaaaaattttctcccattctgtaggttgcctgttcactctgatggtagtttgttttgctgtgcagaagctgttgagtttaattagatcccatttgtcaattttggcttttgttgccattgcttttggggttttaaacatgaagtccttgcccatgcctatgtcctgaatggtattgcctaggttttcttctagagtttttatggttttaggtctaacatttaagtctttaatccatcttgaattaatttttgtataagttgtaaggaagggatccagtttcagcttctacatatggctagccagttttcccagcaccatttattaaatagggaatcctttccccattgcttgtttttgtcaggtttgttaaagatcagatagttgtagacatgcggcattatttctgagggctgtgttctgttctattggtctatatctctgttttggtaccagtaccatgctgttttggttactgtagccttgtagtatagtttgaagttaggtagtgtgatgcctccagctttgttcttttggcttaggattgacttggcgatgcgggctcttttttggttccatatgaactttaaagtagttttttccaattctgtgaagaaagccattggtagcttgatggagatggcattgaatctataaattaccttgggcagtatggccattttcatgatattgatttttcctatccatgagcttggaatgttcttccatttgtttgtatcctcttttatttccttgagcagtggtttgtagttctccttgaagaggtccttcacatcccttgtaagttggattcctaggtattttattctctttgaaacaattgtgaatgggagttcactcatgatttggctctctgtttgtctgttattggtgtataagaatgcttgtgatttttgtacattgattttgtatcctgagactttgctgaagttgtttatcagcttgaggagattttgggctgagacagtggggttttctagatacacaatcatgtcatctgcaaagagggacaatttgacttcctcttttcctaattgaataccctttatttccttctcctgcctgattgccctggccagaacttccaacactatgttgaataggagtggtgagagagggcatccctgtcttgtgcctgttttcaaagggaatgcttccagtttttgcccattcagtatgatattggctgtgggtttgtcatagatagctcttattattttgagatacgtcccatcaatacctaatttattgagagtttttagcatgaagtgttgttgaattttgtcaaaggcctcttctgcatctattgagataatcctgtggtttttgtctttggttctgtttatatgctggattacatttattgatttgcatatgttgaaccagccttgcatccagggatgaagcccagttgatcatggaggataagctttttgatgtgctgctggattcggtttgccagtattttattgagaatttttgcatcaatgttcgtcaaggatattggtctaaaattctcttttttggttgtctctgccagactttggtatcaggatgaggctggcctcataaaatgagttagggaggattccctctttttctattgattggaatagtttcagaaggaatggtaccagctcctcttttcacctctggtagaatttggctgtgaatccatctggtcctggactttttttggttggtaagctattgattattgcctcaatttcagagcctgtttttggtctattaagagattcaacttctttctggtttagtcttgggagggtgtatgtgtcaaggaatttatctatttcttctagattttctagtttatttgcgtagaggtgtttatagtattctctgatagtagtttgtatttctgtgggatcggtggtgatatcccctttgtcattttttattgcgtctatttgattcttctctcttttcttctttagtagtcttgctaacagtctatcagttttgttgatcttttcgaaaaaccagctcctggattcattaattttttgaaggtatttttgtgtctctatttccttcagttctgctctgatcttagttatttcttgccttctgctagcttttgaatgtgtttggtcttgcttttctagttcttttaattgtgatgttagggtgtcacttttagatctttcctggtttctcttgtgggcatttagtgctataaatttccctctacacactgctttgaatgtgtcccagagattctggtatgttgtgtctttgttctcattggtttcaaagaacatctttatttctgccttcattttgttatgtacccagtagtcattcaggagcaggttgttcagtttccatgtagttgagcggttttgagtgagtttcttaatcctgagttctagtttgattgcactgtggtctgagagacagtttgttataatttctgttcttttacatttgctgaggagtgctttacttccaactatgtggtcaattttggagtaggtgtggtgtggtgctgaaaagaatgtatattccgttgatttggggtggagagttctgtagatttctattaggtccacttggtgcagagctgagatcaattcctgggtatccttgttgactttctgtctcgttgatctgtctaatgttgacagtggggtgttaaagtctcccattattaatgtgtgggagtctaagtctctttgtaggtcactcaggacttgctatatgaatctgggtgctcctgtattgggtgcatatatatttaggatagttagctcttcttgttgaattgatccctttaccattatgtaatggccttctttgtctctttttatctttgttggtttaaagtctgttttatcagagactaggattgcaaccactgcctttttttgttttccatttgcttggtagatcttcctccatccctttattttgagcctatatgtctctgcacgtgagatgggtttcctgaatgcagcacaccgatgggtcttgactatccaatttgccagtctgtgtcttttaattggagcttttagcccatttacatttaaagttaatattgttatgtgtgaatttgatcctgtcattatgatgttagctggttattttgcttgttagttgatgcagtttcttcctagccttgatagtctttacaatttggcatgtttttgcagtggctggtaccggtcgttcctttccatgtttagtgcttccttcaggagctcatttagggcaggcctgctggtgacaaaatctctcagcatttgcttgtctgtaaagtattttatttctccttcacttatgaagcttagtttggcaggatatgaaattctgggttgaaaattcttttcttaagaatgttgaatattggtccccactctcttctggcttgcagagtttctgctgagagatccgctgttagtctgatgggcttccctttgtgggtaacccgacctttctctctggctgcccttaacgttttttccttcatttcaactttggtgaatctgacaattatgtgtcttggagttgctcctcttgaggagtatctttgtggcgttctctgtatttcctgaatctgaatgttggcctgccttgctagattggggaagttctcctggataatatcctgcagagtgttttccaacttggttccattctccccgtcactttcaggtacaccaatcagacgtagatttggtcttttcacatagtcccatatttcttggaggctttgttcatttctttttattcttttttctctaaacttctcttctcgcttcatttcattcatttcatcttccatcactgataccctttcttccagttgatggcatcggctactgaggcttctgcattcgtcacgtagctctcgtgccttggttttcagctccatcaggtcctttaaggacttctctgcattggttattctagttatccattcgtctaattttttttcaaaacttttaacttctttgctattggttcgaatttcctcctgtagctcagagtagtttgatcgtctgaagccttcttctctcaactcgtcaaagtcattctccatccagctttgttccgttgctggtgaggagctgcgttccttcggaggaggagaggcactctgctttttagagtttccagtttttctggtctgtttttttcccatctttgtggttttatctacctttggtctttgatgatggtgacgtacagatgcactttttgtgtggatgtcctttctgtttgttagttttccttctaacagactggaccctcagctgcaggtctgttggagtttgctagaggtccactctagaccctgtttgcctgggtatcaccagtggtggctgcagaacagcggatattggtgaactgcaaatgctgctgcctggttgttcctctggaagttttgtctcagaggagtacccggccgtgtgaggtgtcagtctgcccctactggggggtgcctccccgttaggctactcggaagtcagggacccacttgaggaggcagtctgtctgttctcagatctcaagctgcgtgctgggagaaccactactctcttcaaagctgtcagagagggacatttaagtctgcagaggttactgctatctttttgtttgtctgtgccctgcccccagaggtggagcctacagaggcaggcaggcctccttgagctgtggtgagctccacccagttctagcttcccggctgctttgtttacctaatcaaacaactaactgggcaatggcgggaacccctcccccaacctcgctgccgccttgcagtttgatctcagactgctgtgctagcaatgagcgacacacggtgggcataggaccctccgagccatgtgtgggatataatctcctggtgtgccattttttaagcccattggaaaagcacagtattagggtgggagtgacccgattttctaggtgccatctgtcacccctttctttgactaggaaagggaattccctgaccccttgcacttcctgggtgaggcgatgccttcccctgctactgctcgtgcacagtgcgctgcacccactgtcctgcacctactctctggcactccccagtgagatgaacccggtacctcagttggaaatgcagaaatcacccatcttctgtgttgctcacgctcggagctgtagatcggaggtgttccttttcggccatcttggctcctccgttattatctttactgttgcttattttgaacaggcctacaagcatctcctggtgcacatgacctagagtttctcttggaatagagtcgctgagtctttagttatgcatacttttaactttactagaaaataccaatctgttttccaaacagttgttctagtttaacattcccaccagcaaaatagtagagtttctgtgtatatacattttctccagcacttcttattgtccaatttattatttttgaggacaattaagtgggtgtaaagtggtatcccctagaattttggtttgaatgttcatcttcccttaggtgatttttccagaactggaattctgtatctcctttgcactaacaaagcagtagattactgtaaagctataaaacacaaattaaataatatgatcatctgtaatgcagcagtcaaggagtgattaggatgtgctgtgaggacggaagagaagtcattcttacagtgcagtagaaaaagccttggtcttgaatcaggagagtcagtgcctggtcctagctctgtaagtgattggctgagtgactcacatgaaaacctcatttttcagtgtttccatttcctcatctgttatttaagggtgttgatcacagagagtatgctctggtctacatttttgtcatttagtaaatcataatcatcacattcttttgggtgtttctttaaagcatttggcctccattttctcaggtgatatttccaatacctaagtaatgtaggcagagaaaagatgaaataaaagcctacaaattttggcaggggtctccgtagtgtgactgtggggagaccaggaagctcctcaagcccataaatatctctgttctggcctcccttagagcctaaaactccacaattactgtttcactgctatagttcttgaatgcctttgggtctgttggagtcttccattaaaatgcaaatgtccctggagggggtggggagagcctttaagctcattatcacctaaatcttccacagggattaattgatcagatccttccccatcagacacctggttggaaacagagcctgtgggaatgggcacctggttgatgaggggaagccctgggagggagaagaaaggttataaagagagaggtggaccaaccagggctccctagggtttggccatttgctgcttcccacaggctcatctctagccagaagctcaaaatccagctggtcaaacacactgggctactgctgtctccttggggggaagtttcctcttagaactaactaaaggctgccaaccagcggcaaaccctcctgtgtctgcaaatggctgccaaaagcccctccgcgctacacacttctgtggcagatgcctctgagcagccttctttatgagtcagtgctaaagcctagcccaggttctaatgtggccactctgaggcgtggacaggccttgtcaaaggctgggcatgcgtgtgggtgcctcatctgctttgtttgacatccaaacaactcttttaaaatgtggctctagccccacctcacaaagggggcctgaagggtgttgtggaatgtgcttggacctgctctgttttctttcggtcacccacacaaaaatgtgccttcccctcccctgccaggaaactccctcagcaatgcatggttttgcctccgctgaccctggccccttaacatgtcagaatgttaataaaacactacggctgtcataacgcaaggttaaatgaagtcttcacaacctgtccattaagcggatgtttgtgtgtgtggctttctgcagcttctctctggatacagcctgtctcagtttgtgggcagtcgatcgagccttgggcctttgtctttgttcactgttgtgtttaaatcccccccattcattaatcatccctttgcctatttataccggtggcaaggatagcgaacacacttaacgtctgcttttgttttggtggcaccctttgtgaggaccaaggcagagctaattattaactgcgaaaagacgttaaaacttttagataagcgccaaatgctgcatccactgagacgcagttttgtttaaaccttcgagagcttgcggccaagcaactggggtggctttatttagctttgagtccaggggagtgatgccagtgctcagataattaatagaggctctccattaagacccagccgggcagcagaatccaagcgccctgtatgcacctctgaacacccagctgggtcatccagacctgagcaggcacaggcaggggtggcagcttcagacgtagggctcaagggggctcctccaacctatatgtttacatttcctgtgtacatttcctgtgaagatcttcgttgtcagcttttggtgacttttacaccctccagtaggatcctgattttcctttgctgttggacattttgtggagccaactattttaggtacagctatatcagcttattaaacagttatgcggcttgctactgttcttctgaaagaggtctccccgaccacgttttctaaagcagttgcctaagcccacagccatccctcagttacctctattccattacccagtttttttttcccctccaaggcatctgtcgctatttgaaataatcgtatttgtttgtatttcttgtctgtttgatactagaatgtaaacctcttgtatcctttgcacttagctcttgatcgtcgcctggcacatatcaggggccaaacagatatttattttatgtgtgggggaggaaaaaaatatatttccctctacccattctaggctcattggccagggccctgtaaattagattgccaaaagataggttaacaagagaaaagtattttttgttgttgttgtaaattttatttttgaattgcattttttcctgctgatacatgaaaaagcaattttttgttttcatattatacacaacatcctaacttaacttttgtttatttactagtttgcatttcttaagtagacagtcatattatctacaagcaaaagatttgtttcttcctttccaatccttatagtttttattgctttttcttatcttattacactatataggacctccagtgtaatgtaggataaagtagtaatggaattatatcccaaaagttttcttaaaaataaagaaagcccacattactagtttacccacataataaaatttcttagaaccacataataaaatttcttagaacataaaattcttcgtttttaagtatccaattcattggtttttagcatatccacaaggttgtgcaactgtcaccactattcaatcaaaaacatttccgtcattccaaagagacaccccttaaccatttatacttactcccaatctgcctcttccttcagcccctgataaccttaatcaactttctgtctctatagatttgcctattcttggcattttatacaaatgtagtcatacaacatgtagcctttcatgtctggcttctttcatttggcatagtgttttcaaggatgattcttattgtatcataaatcagaacttcctttcctttttatgggtaaataatattccattgtatagatataccatattttatctatccattaatcagttgatggacattttggttatttctacattttggctatgatgaataatgaataatgctgctattaatattttttgtatacgtttttgtgtgaatatgtttttcagtatcttgattatatacttaggagtggaatttctgggtcatatggtaactctatgtttaattttttggggaaccacccagctgttttccataggtagtgccattttacacatttccactagcaatacatgagagtttcaatttctctacatcttcaccactacttgttattttttcttacagtgatcctgtgggtgtgaaacagtatctcttttggctttcatttgtactactctaaagactaatgaagttgagcatcttttcatgtgctctttgattatttgtatatcttctttaaaaaactgtctattcacattttttggcttttttttttgagacagagtatcactctgtagtccaggctggtgtgcagtggcgtgatctcggctcactgcaacctccacctcctggattcaagcaattcttctgcctcagcctcccaagtagctgggattataggcatccgccaccacgtccagctaatttttgtatttttagtagagacggggtttcaccatgttggtcatgctggtctcgaactcctgacctcgtgatctgcccacctcggcctcccaaagtgctgggattacaggcatgagccaccacgcctggccttttttggctatttttaaattgagttatttgtctttatattgttgagttacaagagttctttatatattctggatactaaacctttatcagataaatggtttctaaatattttcacccattctataggttgtatttttggtttcttggtagtatttctgataaacaaaatttttaattttgatgaaattcaatgtatttattgttttctttgatggcttgtacttttggtgttacatctaagaaactattgactaatccaaggtcatgaagatacacacctgtgtgctcctctaagaattttgtatctttggcttattcatttaggtcttttattaagtttggattttgtatatggtgtgaggtagggtgggtccaaatgtagtcttttgcatgtggatatccagttctcccagtattatatgttgaagagactggagagtgggcattcttgtcaggttcttgattttaaaaggaatgtatgctgttagattttttaaatgtaatatttatcagataaaagtattctatataattatgataatctaagagtttaaatcacatactagcctcttcactggaatgtgagaaccaatgtcattcccttcattaggggtgcagtcctgggatataaccttggcaatagaaatttagtgcttcctgtacctagaacagtcacgaaacaagataaagagaaggtacctattgctagtcctgttcagcagagtgactattcctgagacttggctagctcatagatcttaacttttgtgcctgcttcaaatgttggcagtggccatatggactgttgtgtttagaagtcttaggttgctctgatatcacagcgattgattaatgatatctgaaacctgcatgaaaagagataggcaatatagatatgacacatttgccattcttgtattggtccctctttctctgtcagatctgtcgtacttgaccctttttacattaaattgctctgtggatagaaccccttttctttcttgatcattggatttggccatttttctcttgttcagcttaatgcttagttctgactccttctgatggatacatcctgtttaatacttatgtatcagagaacaaagtcacaagctttgctaaggtagacacatgtgtttgacagtcctggccccaggtattctgttttgttgtcagattacgtgtcagaagaatatatccccataaggagtgagaaaatgagataaaaaatacaatattcagaatgacaattagagcatctagaccaaacaatatcataggcaacctctatgtctttttgaaaaatacaatataaaagatgacttgcagtgaaggaggtagtcctctttcatgagacatgtagggaataaggttgaatgatcaactaatgtcccaaagtctcacatgccatatggaatcagtatcatgttgatggtttggagaatttcctaggaatgcagtctgtggtaccaatattgccctttccgaaggcttaggggtctgcctttatgatcaaggcttttatctgcattacagttcctggcacttgaaagcttctgatatattggattatttgggattaacattcagcatcaaatagtatagaacttcatacctctctcatggcatggtccggacattagcaaggcgggacttgtgcagtggctccattgtggcagggagtcagctcattctagctcattcatgtaccatgtttatagtccctgtggcaaagaagactcatctccccattgttgtatcacattaagcaaaaatgcaaaaagaaggagaaagcatgctcattcttcttaaggacattgcctggatgttgtataagtcatttcggctctcattcccttttgccagaacttaagttacatgaccacacctctttgcatgttcccatcaaaaaaaacctagcagtgtatttcctagagaagaatgagacaatagattttggagaacaaccagcagtctctgctgaataacaatattttgttaaataaatgagaaaagctaaatcaaaataaaacagtgtagaaatatattacccttaagatcaccagatccaagcctttaatgatcttaatggaaaagaacacagatctagtattccagacatccatgaacttttatttcaaggatgtgttgctatggggcacccttcatttgctggcagtaacctgaaacctgggatgaaatgaacatacctgaaatctctgtcactcttctccctaaaggtcatcagaggagttgcttctacaacctaagaggaaggatcattaatttcttaatctgtctaagggtagatcgtcacttacctggaagctgttttataaagggaatatgttagaatggtagacaatattagcatttttcaatatatgattttcatttcctttctgagctgagatatgaaatgcccctgtgcaacttcctatttaacttacatcccagctgaggtcatcttagagggtaccttgtattttgggatggtggaatcacaacatccatctagtaactagcttactagacagctgccctagagagtcattcacatccacgttgatattgtttaagcgcctaaacttttgctgtattagggtgataagatttagggatttctggttcctgcatatgacgcagtctatcctgactatcacattttgcaagtacttatcagcctccaggtgtaaacagagtcattgattatggagtcctggaattgactagaaataggaaaagtatttactctcaaatatcttaaaatgtggctaactcatccaattatagcaactcaaggtctaattgtaagccaagtcttacagaattgtgttcttaaaacaaaagagtgattagtgttggatatggttcatctgggaagacttcctttaacaggaaaaaaaaatcactttctccatctgtgctggaagaaagtaactcaaacacagtcaggaacagagaatgtatgcaatgtaaatggctaaacctgacagcctctggctaattggaagtgtcggtgttattgtgcttaggttaatggggctctttagtttaccatctgagctgcttctcccaaggaatcacagcaaccagcagtctccaagggctcaaaaaccctggaggacttctctttggtccctgggagctgcaccctgggcacttacagcaagctcacaggtgatgagaactcatagttcagcattttgcttctcttctatgaaaaaaaccgactgttttcttcataaattagacccagccaaagatcttgattcttccattattctttccaaacagtgtcataaaagagaagaacaagagggtggactagggacctctgacttctgacccttcctccttaagcagcctgatatactctgcaggctgcccttctgatggccacagatgacaggaagagttgctgaaaaaaaaaatatgggcttaaccaacattcacagaccaactccatgcctggcagtccctgagccacatctttgacttatgatattagaggagtattatgggccattggtttagattctttatgatagcattgacatgtcatagaatgtcagctggggacttaaggctcatgatagctcaagatgacataccattaggcttagactaggcaacaagtggctattggaatgatgggacatttataggagagcaggtaagatcagatttcttccaagatacattctttctcctgtagaggcttttgtcatttcacttatcccactgaattactttccctgttgtgttaggtatgcctcaggggcagagaacgtaatacatttcacttttaggttcttggtgcctggaggagtgtgtaatgcatagttgctgctcagttaataatgtttgtattgaatggaaataaccaagagtctttggtctagagaggaggagaatgaagtgtcatgatcaagatctgttaaatcctacatggggaagactaggttgaaaggggagttagttgctaagtcctaaatacagagttgggagactcccttttgaaaatggatcaaggtaaatttaggaccaatacaaagatgatccagtttccacgtcaggaaataagcttctagatctcattttccaaaagatgatagtggaaagaagcaaatgaatttttgccatagtatatttcaaattgaagaatggcacagcttttaatagcttagaactgggtgcagtggctcacacctgcaatctgagctacttgggagtctgagtcaggaagatcacttgaggctaggagtttcagaccagctgagcaacatagccagaccctgttgccaaaaaagttttttaaaaaattagccaggtgtgatagcatgcacctatagtctcagctactcagagggctgaggcaggaagattgcttgagcccaggagttcaaggctgcaatgagctatgagtgtgccactgcactgcagcctgggtgacagagtgaaatactgtctcttaaaaacaaaaaaaaagaccctaaatgaaggcttaatgtagacctccgagatggacagcctgagcctccaatgactcattttttagcattagtgacaataaaaaaaattatgtgtatgtgtgtataggcatgtgtcacttagcaatggggatacattctgagaaatgatagatgaaattaggtgattttgtcattgtgtgaacatcatagtatatgcttaatacaaacctagatggtatagcatgcaatacacctaggccatatggtatagcctattgctcctgagctgcaaacctgtacagcatgttcctgtacagaatactgtaggcagttgtaacacaatggtaagtatttgtgtatctaaacaaaaaaaaagttacagtaaaatacgatattataatcctatgggaccaccatcttatatgtggtccattgttgactgaaatatcattatgtgatatttgactgtatatgggactggtcaaatatgttttccttttctatgatggcctcagagccatcatagactatctataacttcatctctaaccattctttcatgtgaatcttatgtcctagggactttgatctacacattgtactttagacagaccatttaacctgcatttattctcttttccttttcctaccccctttgcctccttcttcctggtaaccttcatttttgctttcctatataaaaccttctaaaccaggcccctttgacctctctcttcttacgtactaatggcaggtgtagactttactgatggtttgctgatagctgcctttaattattatttatgtttttaggcacttattctacttctccaaacttaagactagtgaatacatggtcctttgtgatttagctagagtagaaagctcagtcttatgaaatgaaaactgatatattttttaaagagaacgtactacgaagaaacaacaaagaattaataaaaatgttaaaatcagtaacatatcactaacaatattactaaagatgcaaccattagattttaaaaatctaatttaatggattgacttgttgaatatcagaactgcaagaaaccttaaagatcatcatgctgaattcttatctcatactggtagatgtacaactccaggacaattaatttagtggtagagttaaaaatgttattccttctaataacctagaaattctcatacatatgtatatgtcctaaagaagcttggatatattcataaagtaacattacagagatatctactaatagcattgttttgtgataatgaaaaatttgaagcaaaataaatgttcattaataggaaattagatagataaaatgcattctattcatgagatagaattctagacagaggttaaatggatcaaaaggaataaaacttaaagaaaatcatatggtaagtagaatatgtacaagctcatatccattattatcaaaacaatgttatttctggatgcacatagatgttgaactttaaaaactgattcgtgttctttattttttaatttggaaaaatataccttaaagtgattatgctgaataaaacaaccatctaacattcttattttcaaataaggaaatgcacatcaagagttgtgcttggtgtatggaccatgtttggaccctattttgaaccaaatgaatattaaaaactttatgagtgccacatcttctgtcatcagggaaatgcaaattaaaataatgagataccactgtgcacctattagaatagccaaaatctagaacactgacaacaccaaatgcggatgaggatgtagagccttagggactctcattcatctctggaggggaaacaaaatgagacagccactttggaagatagtttggtggtttcttagaaaactgaacataacttagcttatgatccagccatcacactccttggtatttactcaaatgagttgaagacttatgtccacatagaaacttgcgttcaggtgcttatggcaactttattcataactgccaaaacttggaggcaaccaagaggtccttcagtaggtggatgggaaataaactggggtacatgcagacaatggaatgctattcaacactaaaaagacatgagctatcaaaccatgcaaagacatggaagaaacttaaatgcatattcataagtgaaagaagccaacctgagttatatgctgtatgattctagctatatgtcattctagaaaaggcaaaactatagagagagcacaaagagcagtggttgtcaggtgttatgggggaggaaaggatgaataggcagagaacagaggatttggggggcagtaaaaatactctgtatgatagtgtgatgactgatacatgtcatgtatctgtctaaacccatggaatgtacaacaccaagcgaactctaatgtaaactatgagctttgagtaataacgatgggttgatgtaggttcatcagtgtaacaattgtgccactctggtgggggatgttgataaggggggaggctatgtatgtatccccccatttcccaggggtatatgggaaatctctgtaccttcttctcaattttgctttcgaatttaaaactgctctaagagaagtctttttttttttttttaaagggaaatctgaagcaaatattagaaacatattagggtggtagattcacatgtgtcattttatcttgtctctggaccttaaatattttataattgaaagtaaaaagttcttaatgtaaaaaaaaagactgaaatgatcagggaaatctgacactgactggatatttgataacagtaattataagcttttttaggtatgacaattgtggttatatttaaaattttttttcttagaggtacctaagagtatgtatggaagaaattatttgatgtctgggattcattcaaaaaaaatttgcttgggagaagagggaatagatgtgagtagatatagttgaaactagattagctgtgtgttgatttatagatacaagagggctcattatactgtagtctctatacttacaatttttttgaaatactcccgccaaatttaaaaaattggccttaaaatatagttttagaaccaatgctccttatccagtgctgtttacaatctatctcattgagaccatgataggttggactctctacactggccagagcaagaaagggtacataagcaggttttgcttacaattattttcttactggaggaagtttcgtacaaagagtaatttttatttatgaaaagcagtcccccgttgagccatcagttctagttgaggtgtatctaagatttctttttctttccaaacatgtcaaagcaaccaagccacgtgattgagagtgtgggggcctgaaacacccgcaagcaaccgcaaggggtgggaggttactcattccaacttttatgatgtcccgagaaacggttgcgataagagaaaagactaaaaaataaacgagagataactgagataatgggaaaaacagagggaaacaagacaacactctccagtctttggcttgagatatttattatgccaagggagataaattggagaaacatgaaaagggaaagagatcttgtctctgactcacgtatttctctttaagtgaatgagcaataacaccggaataaaagagctcaaaacagagccatgtgctcagccaaaatcatggttcctaatgaatttcaacgttggcagaagcctcacacgttgtacttgaacagctttcttgattttgaattatacatgtaattcatcctgaccagaatgtagcctgagagccgagatccgaatgtgagtgggaaatgagaatgctggtcacgtgctagagccggtctttcttcttcacgtcagaaatgtctgtgctgtcatcagtttggacagttctgggaaacaaacaaacaaacaaaacttaggaaatcaattgtttggagtcatcttggcaaatacattgtcatatgacatattttcttttcctaccaggctgttctgtattagaaagacacagcccaagatagtcagactacaacgcatgaaacaaatgttgatgaacagaaagggtcaccgatgaggccaacagtccaaaactgtccacctggccttcctgccctgtcttttaacaggacagaggaggatgaaggggaacaagatagacctagatgtggtggcaccttagaaaatttaaccaaaagaagggctgttgttttgctgattctactcagtgaatgcagtggaaagaaaatcagattcagtgggaagaaaatcagattctgctcgctctgtttttaaatagtgggtgagctttagctcacatttcatagagcaaacttttttagggtataaaataatattctttagtaactaaatttacagtctttgttcactgtaactttgactttacttctgaataactgcagctgacaggtcatttctgactattacatgtgttttttcttgagttcaagctaataacccaaaatgttagtcaatcctgcaagtgttatttgcatgtccttaggttttgttaaggtacttcgtgctgtggtgtttactttgggatagaattaaactgttgtgggaaggtgctttcaagaaagtgcttacgagaacaaaagttgttttgaaggtaggtaggtaggtggagggaagaagaaaggagagagagaagggaaaagatcgctggcagagttggaaaaaccagtaggttccaatcccaaatctaccatttactagccctatgaatttgggcaatttatttaacaagcctctttgatcctgtattagtcaattctcgcattgctacagagaaatactggagactgtctaatttacgaagaaaagacatttaattggctcacagtcctgcagcctgtaccagaagcataacacagccatcggcttctggggaggcctcaggaagctttcaatcatgacagaaagtgaaaggggagcaggtggatagtgggagcaggagcaagagagagggagatgctacacacttttaaacagccagatctcatgagaagtcacttgttattgcaaaaacagtaccaagaagatggtgctgaggcatttgtgagaaatccatcaccgtgatccaataacctcccaccaggccccacctctaatcctgggattacaattcaacatgagatttggggaggacacgcatccaaactatatcagcccctcagattatttatgtagaaaatgcaggtgatcactacctaccttgttgtgttgttatgatgattatagataatggcattatttttaaaagaaaggaatgaaagggaaagatacatattctaaaaatgaaaaatctcccaaagcaaatcatatttataggtctgttgctataattccagattttaattttattaaatgttcagaaaagaacaaatcacagatccttggttccaaataagcacatgggaaattatgtgaatattattaaaacgtgagcttcttgtgacaatagtgacattattggaacataaatggcagctcagtcagcgtctccttgtaactatatcaaagaaaagacagttgcagctttgttctctgtgtgacccacttggggtttggctgcttgttgatggatattatcatttttaatgtcagtaaataatgtgatgtcagataaatgacctgtttcctttctgtggtataaagctcatttatctttagggagcttgagtgtgtagagaaatctgagtgggaccaagggtttctgactatgcaggatgggactttttttattaatcctgcttaacatgagtcccaggcagtcacattcaattctaaatgtatgtgtggtaaatcaatggaagtgatatgcatttaccatagactgttttactgattggagaaaaacagaaagtaaactttttttttcaacttgaagaaaatgatgctatacataaagcattactgtgcacgtgcatgtagtagacagaagacatctttctatgtaattcatacttggcttagctagacccttgttgctttaaggaattacggtggtataaaattaaggatcaggaagatgcattttaattaactttactgctaatagctttggagatcacaaaaatgtgaactatggtagagtcaaaaagattctgagatcacaggaaattatgattttgatttctgggctgtagtatctgcttccttcctaagatgaccactgaaaagtccacatcttttatttctgaagatgagtctcatgaatccattgtctctgtttttcatgactgcacatttagccaaagtcactggaatgccatattctctgatgggagatttagtcagggcaaaaaagggccatttgcttttctggaaacctttagacagggtgacaattattccaatgagtttttcttaatattgtgagctcattttgaaacacttccttaaacaaccctctgaagtttcctaggaaaattcatggactctcagagaaccaagtctggaagcctctttagaaatcatttaattaaaatgtttgatttttttttccgatgagaaatcagaggtaaggaatttgctctaggtcccaaggtgagtttcctgcataggagactgaacacaaaggctttgtgtttttactaaaacattattgttttgtcagatattgaaatgtccactgatgatttaatgattaaaactgagaattttttagatttacttttctcagttccatcatattatagagctggcagagagggtagagtaggtatttattttactacccaatgagtagtctcgagaaagacagtgtccacctgttttttctagaataggggttggcaaattacagcccataaaccaaatatggccagtggcttgttttttgtttgtttgtttttacatatgagctacgaatgctttttacatttgtaaaaggtggcaaaaaaccacccaaaaaacaaagaatatttgagatatgtggtgaaggccatgtgtggtctgcaaagaatgaaatatttcctatctggccctttacaggaaaagtttgccaatctgtgatctaaaatattcagagaaaggttctgtgaccttccttgtagatcccacaatacttttgtgtttatattttttaaatgagcatcacagattgcaggaaaataggaaacaatttaatttaatttaatttttagccttgaaaaaaattccttttattgaatttatttatttttccagctgtaaaattggaggcaccactcagaccttgtttggctctatcattttatgagtttatggattacaacagtgaacaaagggcacgtgtatcagtcctttctcatgtgagactacgtaatttataaagaaaagagggtttgtttgtttatttgtttttgtttttgtttattgagacgaagtcttgctcttgtcccccaggctagagtgcaatggcacaatcttgtttcactgcaaactctgcctcccaggttcaagcaattctcctgcctcagtttcccaagtagctgggattacaggcacctgccaccatgcccacctaatttctgtattttaagtagagatggggtttcactatgttggccaggctggtctcgaactcttgacctcagatgatccatccgcctcggcctcccaaagtactgggattacaggcgtgagacgccatgcccagccaaaaagagagttttttttgagacagagtcttgctctgtcacccaggctggagtacagtggtgtgatcttggcttactgtaacctctgcctttgggttcaagcaattctcctgcttcagtctcccaagtagctgggactacaggcatgcacgtccatacctgactagcttttgtatttttagtagagacggggtttcaccattttggccaggctggcctcaaatgcctgacttcaagtgatctgccagccccagcctctcaaagtgctgggattacaggcgtgagccattgcacccagccaagaaaagaggtttaattgactcacagttcctcattggctgaggaagactcaggaaacctaccatcatggcagaagaggatgcaaacatatccttcttcacatggcagcaggagagagaagaatgagtgaaggaggggaatagccccttataaaaccaccagatatcgtgagaactcatgatcatgagaacaatatgagggtagccgcccccattatttaattatctcttaccaagtcccccccacaacacgtgtggatagtgggagctacaattcaagatgagatttgggtgggaacacaaacaaaccatatcagcacactcattcagcacatattcagtgggtatcgagaggctatgctggatgctttgggtaggttggtgaacaaacagtatggttcttgcccttctagaccaatattcagtgggaatacagagggaaagaagaaataatgaagtaaacaatgatgggcatttgtagcggttaggcaggattcagtgtcagataactgtcaaggggaaattcctgagagactccacccactgatcatttgtccgatgtgaagggcaatttatcctaacttccacacatatttatgggtcattttctatgtaccaggcatgaggctgtctgttaggttgagttctcagtcaaaaccatggacaaaggcctccttttggacattttcccaaacctgcttggttctttgttaaaatggtacttgttccaaccttcttttgtttgtttttaacttttattttaagttcaggggtacatgtgcaggtttgttatataggtaaacttctgtcatggatgtttgttgtacagattattttgtcacccaggtactgagcctagtatccattagttacttctcctgatcctctccctcctctcaacctctaccctccagtaggccccagtgtctgttcttcctctcttatgtgtccatgtgttctcatcatttagctcctacttatcagtaagaacatgtgatatttggttttctgttcctgtgttagtttgctaaggataatggcctccagcttcatccatgttcctgcagaggacatgatcttgttcttttttatggctgcgtagtattccatggtatatatgtaccacattttctttatctagtctaccattcatgggcattagggttgattccatgtctttgctattgtgaatagtgctgcagtgaacacatgaatgtgtatgtcttgatgactgaacaacttatattcctcctaggtcgaatggtagctctatttttagctctttgagaaatcaccacactgctttccacaatggttgaactaatctagactcccaccaacagtatttaagcattcccttttctctgcaaccttgccagcatctgtcttattttttgtttgttcgtttgactttttataatagatagccattctgactggtgtgagatggtatctcattgtggttttaatttgcatttctctaattatcagtgatgttgagctttttttcatatgcttgctggccacatgtatgtcttcttttgaaaagtgtctgtgtttcttgcccactttttgatagggttgtttgtttttttcttgtacatttgtttaagttccttatagatgctggatattagaccttcgtcagatgcatagttttgcaaatatcttctcccattctgtaggttgtctgtttactctgttgatagtttcttttgctgtgcagaagctctttagtttaattagatcccatttgtcaatttttgcttttgttgcaattgcttttggcatctttgtcatgaaatctttgcctgttcctatgtgcagaatagtattgcctatcttgagttaatttttgcatatgatgtacggaaggggtccagtttcaatctttggcatatggctggccagttatctcagcaccatttattaaatagagaatcgtttccccattgcttgttttgtccaatttgtcaaagatcagatagttgtagatatgtggccttgtttctgagttctttattctgttccattggtctatgtatctgtttttgtactagtgctaggctgttttcattactgtagccctgtagtatagtttgaagttgggtagtatgatgcctccagctttgttcttttttgcttaggattcccttggctatttgggctcttttttggttccatatgaattttaaaatagtttcttgtagttctttgactaatgtcaatggtagtttaatgggactagcattgaatttataaattgctttgaacagtatggccattttcatgatattgatttttcccatccatgagcatggaatgtttttccatttgtttgtgtcatttctgatttttttgagcagtgttttgtagttatccttttagaggtctttcacttccctggttacctgtatttctaggtattttattctttttgtggcaattgtgaatgggattgtagggaatccaatttcaaaagaggcctacttgggaccaattttaggaatagtttttgtcctcaggaataatccacctgctttataaattatacattaagccctgagctaaaatatgggcaaatctgtctctctcctcttccatagaacttttgctgacttgttagccacaggactttgaattatataatttctcatcaaaaccacatctatttcctgaaacacttcaaaatagctttgactcctaggaaagtctggttaaggagttcagacaccaccttagtggaagcccatctcagtgacaccagatttcctatgttgattgggaagccatgctctgtgttgggagagaaaaaaacatgccttgtagctagaattatgcccaggggtcctcatggcttctgtttccagagctgggcaatggccatcctcagctttgccactactgttttgaacaactttgctcaaacagaagcattgttctggaacttggcgaacttggtgatgatctgaatcatcaatttcagtttgttttaatctggtactgagtttaaagtttaggtagttcaagggtaaagatagcaaaaaaaggaaaggaaaggggatgatgagtagatgaaactgtatgatgagtagatgaaaggggatgatgagtagatgaaactgtatgatgagtagatgaaaggggatgatgagtagatgaaagatgttttactaaaaacaattggtaaaagttgtcagatctatttccatatatctcttccacacattcttttgctttatgttcttaaaattacaatagatctcattttatccttgacattggaattctgaaacatacatgcattccatgaagtccactgtttattgttgaagccaataagtaagacagaacaaaagcaaagtgaagttagaaaggtatccactgtataggtactttacaaattgtgggtaacaaggtggggagaaaagaaggacattctaggagggaaaaagataatatgtattaaggaaaccatattatggggagttaagaactatgaaaatcagtctttctttccttagaatagctcttttcagcctgccccatagtaattctaaaattattggcaggaaaatttggtgcaggcacagcaattagattgaatctgttgctgataggattcttcggcataaaactggatctttttgctacaactaaccattcattccacagtgctttcagttcccagaataattcagctcaagggaatattgacatttttgtctgaatccattctgagtttcatcctataaggaaaacatttttaaatactcttttagccatggtcttgggagcccctgaaatattctttccctcacagatggcagtgccttttcctgctgcctctcgtgttggatcttctctatcccacaggagcagacgggatgttggagcccttctgttagagcagatgggaagttggtatcagggctgatggttaaatcactgagaccctacattagcatgtctgaggaagacagatttgaggctgtcttcctaagaattttctttagtggtcattaaggaagactcagaagaaagattgggttaatctctgtaataagcccatagtggaggcctaatgacagtcagaatattttctggtctcatgggtcttcaaagaaagcaaactcaaggtcctaccaagttcagtgttttcaaggttctaaaaaattcaaggttctcaagggtttaaaagctagtgaaaaaagattacagcccagcttagtagaaatggtagactccaacacattgggtgtgataggagaattcttcattgtcatttgggataggacagctgtttactgtgaggctgccccatgcattctaagaggtttacctctcagaggtttatcctcccatcacccaagggtatggccttacccttggatgatggccatttctccagtgaagtttcctgtagcctgtgtcctagagtatgcagagaggaagctgaaaggtaaaataatcggaggattggactacagactttgagccagttgtttaaaagattctggtctccacacatattgcaggtcacattcttgctgtacagaattcaggagcggatcagggctggaaaagtaggaacagtctcctcaccagtcacccaagaaggtataaactggccgctcaatgtgttttagactcatataaactcagaattggtagaaaaccaaaactagctcatctaaccaactgctcagtagagatgcctttgccaaatgggcatgtctttaagatataaccataggtatatggtgaagtctgtgccagagatttatgttaaattcttgcagattcttgtgtaggtgctctcagactggtctctaggaaatatggtaaatttgtttacagtaaatattggctaattgactaaaagtaaggcttctagagtttagttcctgcttcaaccactaactagctctttgaccttaagcaagtccgtttgcttctctgagtctagctcagtttctcatacgtaaagcagagataatactgctaccaattttggagatttaactaattctgccctaaaactcttcccttcaaaagcaatggtaaaaattattactggagcataagtaaatgtttatcatataaaggaaactatatctctagaaatgttatacatgtaaaattttaaaattctataaaatggttggtttcttttagaccttttagttttgtgatattttaatccagaaattgaactctggactgaagttcaccttctcttatttgaaaatttatatgaggttagagaggaggaaaataaactaaaaaatattatctgttactactaatcttgcaaggtatttgtggtattggtattcaaggagttaataaatatgaaatgcttagaagaatacctagcacttggtaaatgtacaataaatatcaactattatgagtatatgtactaaacacagcactaggttaatatctagttttgtctcatagatggatgtgcattgcttcctatgaagaggcaaaagtttgtactgatctgagcagctatatctgtgcctagagaaagaagctggttttaaaaccccttgtccctaagtttgtagtggaatgggataagtcatctggctcttatgctatgcctacccttcagatgacactatctcgctgcaacctctgcctcctgggttcaagcaattctcctgcctcagcctcccaggtagctgggattacaggcatgcaccaccatgcctggctaattttttttgtatatttaatagagatggggtttcaccgtgtcagccaggctggtcttgaactcctgaactcagttgacacacccgccttggcctcccaaagtgctgggattacaggcgtgagccaccacacccagcctatctttgatacattcagaaaggaaagggaaggaggcctttctcctcctacctcctgtgagtggttaggctgggttcataggaagctggccaagctcattagcatggcaagcccctccactacccactgctctggcctttagttgcatactggtcagtaagtggaaaaagggaagggggaggatttgaaacgtaaccacagcagggattcctggaggctgtgggtgattctttaagttggtgcttctctttagggcatagcaccaacgtcttcttgtgagtgtatcctaaaaagtgagcaggtggatttctgctccaagccatgatataatgacaaagactggatttaccttcctgccttatacagttaagaaccagacaaaatatatgaaacaacagtgtcttagtctggttagtgtcgctctaacagaacacctgaggctgagtagtttataaagcaaagaggtttatttggctcacaattctggtggctcagaagtccaagactgggcagctgcatctagtgaaggcctccctcatactgctcccactcatgatggaaagcagaaagggagctgggaatatgcaaagagatcacatgcgagagaggaagcaaggaccccagactctttctagcaacccacggctctcaaggggactaatctcttcccaccagagtgagaactcactcaccactgtaggaaggcactgggcattaatctattcatgagggatctgcccccatgactcaaacacctgctactaggtcccatctctcaacactgccacattggggatcaaatttcaacatgagttttgtcagggacacaccccatccaaaccatagcaaacaggttgcaaatattggacaataggtagcacagaacattgatcctcaagagaagaacaaacagggtgagccctacaattgctccagcccaccatctacagagtatatctagactgcagtgcagggagggccaactcaaacagtcctctggtctccctgagttgagatgaagttgagaattaggggagaccaaagtggctagaattcccagggaagaataccagaaaggagagcattaatggagaggagagaatattttataaggggtatctgagtgcttactgatcagagcatgatgtgaggaaactccctgaagcttggggaagaaactctctaaaggagcagatggagcaccctttggagctcacacaggaccagaagtagtgctgttgccaccagctggagcagaaaatcagaatatacagggcatccagtagactactcaggagagtattgtctcaatagtagggcaagattaaagagtgctgtggtcctgcctaacaaaacctaaaaacaagcttcaaattgtttacaaacacttttctttgtcccagaaataaaacacttcacaaatatttaaatgaatatcagatttataatatctggcatcaaagaaacatgagaaatatgacccaaaatggggagaaaaatttgatcaatagaaacatacacagatgatagaattagtaaacaaagacattaaaatagctattataactctatcctgtatgctcaagaaggtaaaggaaagcatgaaagtgttaagaagataaaaaaaaagataatgagcatcagacccaaagcaaaattctagaggtgaaaaatgccatgtctagaccaaaagcactctaggtggaattagtggaagattagacactagcagaagaaaagattagtgaacctgaaactatcgcaatagaaatcattcagaatgaatcagaaaaatcactgaagaaaatgaacaaagaaactgtgagctacaggacaacttcaagctgatggatatgtttgtaattagagttccaaagttatcagaagaagaaaaaaaataaaggtacaaacagaaatcagtgaaacagaaaagagaaaagcaaaagagaaaaatcaatgaaaacaaaaccttgttctttgagactattaataaaattgataaacctctagcttaccagagtgataaggaaccagatagaaggcacagattaccaatatcaagaataaaagagtaaatatcaatgatgttgaaaatgtaattaggaaatattatgaacaactttatgccaataagtttgacaacttggataaaatggacagatttcttcaaagatacaaactatcaaactcctgacaagaagaaataggtaaactcaatagccatttataattttttttttgagacggagtctcactctgtcacccaggctggagtgcagtggtgccatctcggctcactacaacctccgcctcctgggttcaagcaattctcctgcctcagcctcccgagtagctgggactacaggcacgtgccaccacacttggctaactttttggatttttagtggagatggggtttcaccgtgttagctaggatggtctcaatcttctgacctcgtaatctgcctgacttagcctcccaaagtgctgggattacaggtgcgagccactgcatctggcctgccatatgtcatttttgaaaattgaatttgtagttaagaatcttcccacaaacaaaaccacagatctaagatggcttcactgatgaattctaagaaagatttaatgagggactaattctgattcctcattaacttttctagattattggagagaaacatacactttccgtttcattctgtgatgttagcattatcctgatatcaaaactagaataagattttatgagatacctcagtctccatgaagtgcttatttcacattgcatgcctgtatcaaaacatatcatgtaccccataaatatatacacctaccattacccacaaaaattttaaaaaattaatttaattaaaaaatttttaaaaaattatgagaaaattaaattctttccaatatctcttatgaacaaagatgcaaaaaagttttaaagatttttttgtaagtcagattcaataatatgtagaaataataatgtatcatgaccaagttgggttaattctaggactacaaagttattttaacattctaaatgtaaatagggaccttttcctaaaaggaaaacattattcttctccatcttatcctcattgttgtagagcactgggttttctttcttactgtgatgggtaaggaaaggcctcaggtcttaggggatctgctaatgagctaagcagaaggtccctattcatatggcctcatatttgtcacccagagggtagcaacaatctaggacccagcgaccctcagaagtgtgtgagacttgggactagcggaaacagaatgggttttggagtcagaccttggttcaaatacaagtttcaccatttgttgaacaaattatttaatgtttctgagctttagagaaattatgaggattaaggccgggtgcggtggctcacgcctgtaatcctagcactttgctaggccgaggcaggggggattgcctgagctcaggagttcgagactagcctgggcaacacagggaaacccaatctctactaaaatacaaaaaattagctgggcatagtggcgtgcgcctgtagtcccagctactcaggaggctaaggcaggagaatcgcttcaacctggggaggcagagattgcagtgagccaagatcgcaccactgcactctagcctgggtgacagagcgagacttcatctccaaaaaaaaagaagattgttctgaagctcagaggtgagacacataaagcccttggcacatagcaagcatgcagtgcatggtggctgtggtggtagttcattttgttgagaccctgtagcatgaggtttaagagctgtgggtctggatgaggatagcttggattcgaacaccagctctgttacatttctgtttgtgagaccttgcctagtttcctagtctgtgaaataggattaacagtactatctatctcaacagagttgtgttgtagtgaagttcttttgatacatgagtagctcttagaatgatgcctggcccactttcaagtaagtgctcgcattaactattattttaatgctattatcgtttctctggccactggtgtggtcattactgttgttaacaggccagataagggtctgatattctagcaagaaatggtcctagcaagaaggattcacaaaccaaagtgaggacaccaggtaacagagtcactgagtgctcgagtttgctcagcctccagattttatttggctccgttgaaagcagacctgcctggccctgactcatcagagaaagctgaattgctgcacctgggaagagtgaagccttggcgggcaagggcagggcagaccctgcaaacaatctatctcggagacaggaatattttgttagagatgcgcccagttggggttgggccttcctgaatggtgatgggatgcagtgtgaatggagacctgggctataattgagaaccatgtggccatgtcagcaggtgatggcacttgagtgacagtatgacagagaacagaaacagggccacagctagccgctctgcctgccatagcgatgtacactgtgcagatttctacccagccaggaatgagccgggcctggagaggcctgccagacggtgggctgcatgctaccaatttctttcagcacctcctattttgccattcatagactcttgccattaagcagacagaacagctcatatcctgtggacagatgatagatatgtcatatcactgaaaaattgtttgtcttccacaggtgtatgggcttcttctaaagcaggcagctcacatgacacttttcaacactctgtcctgtaccagcttggcatccggcgtctatcaaaaggggaatctttcatatgcaattatggcagaaaataaaggtgatgaagtgttgtgtaccaagaagggataagatcaaagggcggtaatgaataccgattacaatagaagggcagcttcaactgcagaagttgtgtgtgactgtgtagaggctggcgctgcttgggggcatgcactggcacacaccagagtacatgcagaaataatacagtaaaatcataggcactgctgtcataaaattataaattgccggctgggcgcggtggctcacgcctgcaatctcagcactttgcgagattgaggcgggcggatcacctgagttcaggagttcgagaccggcctggccaacatggtgaaaccccgtctctactaaaaatacaaaattagccgggtgtggtggcaggcacctgtaatcccagttaatcaggaggctggggcaggagaattgcttgaacctgggaggcggaggttgcagtgagccaagatcgtaccactgcactccagcctgggcaacagagcgagactccgtctcaaaaagagaaaaattataaattgccaaggtagaccgtaacccaagaggggttacaggtaatgtgtaattgtatcaaggtgatggtaagacacttgtatcctgataattcacgtaatacctgtttcttccagcaccatccaattagtggcaccatttcagacctccaaaagtctagtttatacccattgaggctgattttccaatagagtcttccagagcacaggacctgggcacccaatggtgtgttgtttatttatttttttattgcactctgggaggccaaggggaaaagcacagcctgttcaagtttaggaacagggctgcgtatcattggagacttcacagccatgcagtgtcgccatcccagcagcacgctttttaatcggagaagaatttctctacctgccaagtacttttccttgcagctgctatcatcttgaaaggtacatcacatgatgacatttcaaatcccacaaaatggcttgcccaagtcaattcagcagaggctttaactttaatatctgatcactttctttggaatgctatatgaaaagctgacaattttcaactaatttgtgagtacaccagtttgagttggttaaaaaagacaaaaaaaaaacaacaaaaaaacctcttcattatagattacttaaaattcctttctaattgtattagtttcagtaatgatgactgcagtaatttaaaggaagctagcaaagttttgtcaaatgcctttcagggttcttgctttaatgggaaaattaaatcttctttatcagttgtagtaaatagatgctcaactctttgaaaatggctcctttttctaagtagataaaaaaaatcctgctttgtcttattttaatattggctggattagtaaccattttgctccttttgcaaatataaaaatatattgagagacctcccaattttacaagtaagaaggcctacatcaatgaggattgaggggagagggaaagagaaccagcataggttgaatgtctgctatcttatttaacttcatcttcacaaaagctgtttgttggagatgatagagccattttccagatgagaaaactgaaatgaagtaagctggtctggtctgtccagtggtgttagagctgaattgaaatcctgctttatagagcccccagattggcattccactacctttgctcccccatgctgcttagctcacattggctgtttgccataggctgtctttctctaaccagaagctgctggtcttgtagcacccagagacttgtgcaaatgtcttctgtgagcaattgtaattgagatttccaaatgaaatgtcagtctgctcaccaggggaatagtattacaaagccagtggcccttgcgataccctgtgttttcacagccctcagggccttgtgttgaaaatgtaagcaggcattgctaagaggtctcagtggggctgagtgagcaatgcttcttgcggggaactttatggtagaccaggccaaccatgatgaggactacctggccagctcagaaaggcttcttggtgcaaatctcactcttaagttcccagtgaagtcctctttgtgtcttcgtaggtatggtacatggctgtaattgaatacattaatcctgtggcattttcacccattagcactgcagcataagtccttagaaagaaccatgttttgaggaaaagtgggcacggggaagacaaattccaatataagaaggaaaggagagcagtctgcagtcaaagaggcattccagagggcactggatggtggtagggaaacagggatcctctgaactcagttggggtgaggaataggagaaacttccctacttgacaattttgcctaaggccagctctactcagtaagcctcctgggatcagcttgctcacttcaaaggatctagaccatcagaagaacaaaacaatatttccctctgtggcaatgtggcattgcagctgtcatcacaattgtatccagaaaagcagcgtattcaagtggcagcttgttccttgaggcttgtctcatctttgagaaatacccagtgacacctctcagaggaaatccctcattccagctctgtgtgatcgtttctgcaggcagcaagcactttaggaatatgttcctgggcataatgagccctccgatggtgttcaccgtgtttgttcacaagagaacccagccagagttttgtgagagaccagacagagcttcttgagcccagcaacaggaggcacagaagaatttctggttgtttccttagacttgtaagaactgttatttgaggacttcattgaaaccagtctttatgtccccaccctttccatttccttttccttttaacccacagactgctgttcactgttgtagaatggagttgatgactgattaaaaaaaagtttctgcaaccttccattgcatgaaaagaataggatgcaatcaaggaggggggggtggtggaggagtagaggacatttccctgttctctgctctccccaccttggacttacagaatcctagacctgaaaggagctttttttcaagcatgtagctggcctaattctcaaactgaacagatgaggaaacggaggcctagagagtggaggtgtttgcctcaagtgacactgatggctgatgaccagttccatagctggcatactttgttcagctctgcagacgatagtttaaggcaaggacacatgacaggaggatggctgggaggatcgggagcttatgacgatgttttgaagaacccaggactgtcttgtcggtaagaaagaaaatgcttcaagggattataaagaccatcctcaaacatttgaaccgtttccacactgcagcatagggagatttattctttgtaattgctaagggcacagctagaatccacggacatatttatatgaagagcgagtttgactcaagatgaggaagatgttgatctgccttcaatatgagcctggaatgcctgaaagagtagtgagtccactgccttggaagaaccaactgtccctcaaaaaagaggacatgttcaaagaggtttctacatggggaatctccttttcaaagctaaagtgaatcaacaagattctcatcagagtccctaagagtccccatcaaatagggaggtaagtggaattaatgaaaaacgctgaaggtatcagtttctgcaaagccagtcatctccagagcagtgtatgaatctagatctaccacaggctttggggtcgttagctttcgctgttgtggagcccagataggggatagctttgaaagtaagggctgctgctacttataggatgaaagtggaaatgcgttagtttcgattttgggtaaacttgatgatagggaaaaaaaaggcacccatggctgggatctctagttttagtccaaaggtggtaaatcagtcccaggatagaaagactcctgtgagcccagtagagaccaggcctcagaaaaagccatggccactgctttggaaaaaacttttttttttttttttttttttttttgagacagagtctcacactgtcaccccggctggagtgcaatggcgtgatctctgctcactgcaacctcccaggttcaaacaattttcctccctcagcctcccaagtggctgggattacaggtgcccgccaccacacccggctaattttttgtatttttagtagagatggggtttcaccatgttggccaagctggtctcaaactcctgacctcgtgatcctcctgcctcggcctcccatagtgctgggattacagacatgagccactgcacctggcctggaaggaacctttaacagagacttttatagatacctctgaggtttaaaggccactaaggagaagatccagggcactggaatgcctgaaccccagaatgggctgatgaaataaagtcccctttacccctggttccatcacactggcctgccctttgcctgttgtggcctctaacctgtctatcctttaaggttcagactcttgattctaacttgttatggctatgtatcttatttggaatctctaatgcttgaatctactgcttccagaaagctttcctggccttatcaatctaccctagagtctcctgcttctgagtttaggggtgggaacaggtgacaggcagtatatcaggacacaaggaggtctcaggggttaccctgtcactctgggtcgatgcttgggctgggtgctgtcagcttccctccctagttgctataagagtgccactgtgagtcttctcaaagtgtctcccgctttgctccctctcttttactgtcatgctcccttctaggatggacctggatccccagcccattggaataggctgttcccaagtttgggtaaacaccatgtccaagacacccttctccctttttgcagacatttcttctatatacatttctcaagggcccactgacctcttccaggctgatgatgtgtaacccaaagccttgagctcattctcactgggtcattcagtccatcctcccagaggactgcttcatcaattgctttgtttgtgcttttccccaggatctcagttggctttgagatgtttgactcatcgtcagtacttcccaatttcctcctgaaggtaccaaccatgtttgctaatttaaccatcagatatcccgtccgagttgctcatgagcatgagaaaacactaacgccttttttcccgtgggtggtatttgttggcttgtaaatctgaacaggaagagtacatttatttggagaaactatgaaatgcctacccttgaagagtgtttttgttgggggcagcaagagagtctgtatgcccataagtaccgggattcaggacttgagatcaggctagaggccagagataaggacctctttctaatctttgctgcaaatgaaaatggtcaataaatcagaactatttatggaatgcctaccatgttcagataacaggagaatgagaagttataaaaacaggcaaaaccatcttgactgaaaacttaacctaccacttgttggaggcctttgggactaaatctcacaggggtgcttgttgtctagaaattgagaacataatttagctcctgcttgagactgagaagtcctttgttatgtttattagatggggctgagttttaggatggcagaaatgcaaccttaactttctattcagcacctttaatgtatttctgctgaatacagaagacagttaatgtctctgaccccatttttttatttggagaaaagatctagcaatacctacctcaggctgtagttctgagaagtatattaagttcgttttcacactgctatgaagaagtacttgagactgggtaatttataaaggaaggaggtttaattgactcacagttccatgtggctggggaggcctcaggaaatcatggtggaaggcaaagggaagcaaggcatatcttacatggtggcaggatagagagagtgagggaaagtgccacacttttaaaccaccagatcttgtgagaactccctcactatcatgagaacagtgtgaggaaaaacactcccatgatccaatcacctcccaccaagttcttccctcgacatgtggggattacagttcaaggtgagatttgggtggggacgcagagacaaaccacatcaagaagtaaacaaaacattgtatgtcaggcactttgcaatgtacttggcacccaataggcaccaatgaacagacgatgctattgtagctggaccatcattgccggtgcctcctgggaagcagatgggaaacagtgttcatgttgtgtcctaccttgtcccatggaaaatcctgattttgagttctcttatctctcagattttatagtgttaagttagcacactgtagacagggtacatggaaaaatgtctggtgtccctgacacaagaaaagggacaaatctctctaagagagccatctggggtcttgtattgatgaaagcagtaaagaactgtggaaggagagaaaagctaagtgtctaaatgaagagtttgctacacacattctcaagggtgaagactggacaagacagactggcagaaggagaggagctaaggggtgatggtcccaggaaagaatggtgagcagcatcaagggtagtcaaagttgaaatagagaaggacaagccagttataaaatgagttgactggggcagcaaggctccaccttcttcccagtcagacatcagaacccatagcccagactctgcatgtatttaaagggactagaagacaatatggacccaaaagaggacagtctgcccatctttaggaaggagtcccctctcattttccttgtggatgctgtccatggaagtagacagccctcaactttcttcacagagcaaacttaccttcacctcagttgtgtgcctcacacttacatcagctcaaatagcatgaattctttaaaactacagaaattgttattgttacagcagtttgttcccaaggaacaaaggccacagcaggctggtattattttaatttttccatgacccatttatcaaaaataatgataagatttgaaatagatttcaacatggttaatgagatatttgcaatgcagtttatccgaagtggaagggcctagacatctaaactggttgtctggcaagattaaccttgtgtactttgccccatcttttgagagaaagatctctctaaatttcaaagaaaaaggcatcatttatttgcacctgaatggtacatttctgttcagaaaactgaaatcagctgcatacacagaacccggttgggacaacgtcaccactggggagagggtgagacaggccagatttatgaatacccaaggagggaataagcagatcaagatccatgtgggtacagaaggagatctaaatatgctacacttgtgaaaatttcatttgaataaggaatcaaattgcatcattttattttatttcttattttttagagatggggtattgctctgtcacccaggctggagtacagtggcctgatcatagctgactgcagcttcaaacatctgggtgcaattgttcctcctacctaagcctcccaagtagctggggctacaagtgtgtaccacaatgcctggctatttaaaagaaaaatttgtagagacctgggtcttgctctgttgcccctaggctggtcccaaactcctggcctcaagtgatgctccaccttggccttccaaagtgctgggattacaagtgtgagccaccccacccggccctactttatttattttttttttttttggagacggagtcttactctgttgcccaggctggagtgcagtggcacaatctcagctcactgcaacctctgcctcctgggttcaagtgattctcctgcctcagcttgccatgtagctgggattacaggctcgcaccaccacatctggctaatttttgtatttttagtagagacggggtttcaccgtgttggccaggctggtttcgagctcctgacctcaagtgagatgccctcctcagcctcccaaagtgctgggattacaggcatgagccaatgtacccggacccggccctacatctttttaatgttatgtctattctccttaagactgaagttctgtgtcttgctcttctggtgtatccaattagaagttgaagcaagagatgatcaattccatttaacaaaagaatagagaaaaatgtgtccgacacagcagttgctctcttaaaacaaagtgctatctcatgccttgccctgtagctttcataaaagtattttcaaagtctgcaaaaatgggcaggaaaaagtaatattctggaaaaagtgtatgaagtgggtaaggatgttggcctggtgggtctgggtatagagctaacactgtatagagtagaattttctaagttttaaagtttccccaattgccagagctcaagtatgtgttgtggattgcatttttccagattcaaagctattccctcctttaacattcccgctgtcttcttttcccccagtacgtgtattaatgacccaaacaagaaagacttcatgatggatggtgcttatttaattggccaaaatggaacgatgtgcactttcggaatccctttaattcttgagactaatctacatattggcaacttgtcataagaaatgggtagcaaacgctgaatcaaaactttttaggcttggcagcagtaaaatggcaatgtattaaatattctcttaggagactggagagtaaccattgtataagtgtaatgcagtcatggtaagataatggattaaatggcctcctttaggatattggctttgtatatctcatgtattaaaaaaaatactctttctgattttaatgtgtctctttaagcacacacaaaatggacaatggtcagtaatgagttactgcgttcaggatgaggggatgtttgcaacctgttctgtgcatccaaattccagcctgcctgtaggtttcctgctagagttcacaaggcttcatggctaaacttcctggtggggcttggaatgaaattttcccaggagaccacatggtgatttggaaccagaagagcttgtttacataagatcttctgcatgtaccagttgagagagattgggaaggccactgaaatttgtctctaagaaatatgaatgataatacttggtatttttctttcaaagagattgtgaggactggacaaagtggtggtttgaaaatatttcatatactgcaaagccttgcacaaatattgttattatgattataaaggctcttcctggtctgtaaaaaaaacattttcccaagtcctcccctatcttctatcagccatagtgaatccctgtctattcttagcatgtttgtgcgagggatatgtgaaagcgttggtgtcctcttgtccctctgttaaggactcagacaggatgccgggcacatttgtatccagacatcgttgagatgttttgaaatcggtctggtaagaaccaaagctatgtttccaattaattttctaagtacaaatatgctcaaagtacatttttttttaaaaaagaattcaacaataaagtatggcttgttgctgttcgactgccagaaactcgggatctctatgagtttcactgatatcaaaggcttctgtttaatataactttgtattaaagtgggccttactgtcaacctagcaaaacctcatgtttaatctcaagtttagtgtagtttttttattaatccaatgtgcatctgttaaaaataactccagataatgcaacatttgattaaatggaacttaatacagccattagctggtgggattttttttttccatttacgcattccaagctgagcctgataagatggcactaacatttagcctgaggtgtggaatgttaatagtgggatcttggacagtttgtttattttttatttatttcctgaatgtgccactcacagcaatgtgccagatgggcggcctggaaggcagaaattctctgtttagcctcggagccccaagaaactggcagattagcccccacccccagggcagccccagcttggtagaaaaaggcagaggggtaacattaaatcagagctgcagtatgtttttgttcttttgtcaaaggactgtgcaagtaacatgcttttcagggttggccatgcaaataacatgtcaagtgaaactttaccacctttttacttaggctatatagaaggaaggcctaaaaaatgccctggtcctcttgagcattttgagcccaggctgtcctggtggcaataggtttcctctgttgagaagtcctgcagctctggtgggttaggaccaccctccgcctggcactgagtgggtactctgtcacttcttggagccattaggctgaacagtagccagagaatacagaggccccattcattttgtcggtgcacatttattgggtagttactgtgtgctaggtaggatactaagccctgaagacagggcagtaaaaaagatagactcagtccctgccctcatggaactgacattctatctaacatctagctgctagttgaggatgctgcccatctctgctggtttgtaaaatttggtttctactctattaactgaatttcagctcactgaattagacttatgttccatggaccagttggtcttttgcaataattcttatactggtatttttagtgattttatgttagttttaatttcttcaagataaggattttggtttgatttgattcaacagttatttacaaacttcctattgtgtgtaagacttgacattcttcactactcccagcctctcccagggtgaagaggcaaaatgtacccccttccctcttgcctagcccatccaggaaggccgtcaagaaagggcaagttatataccacacgatgctgtcacatctaaaaggacactatccacatcacagagactgtaaatgtgtatttttatagtggtttcctgacagatgatgtgtcttgttctaagaaaatcattgtatgttaaggatattaagaaaatgtcccccatagcaaatgaaccttgaatcagattctttaaaaagaatcacattctttttaaaattagtataaagacactctgtaagccagtgggccccttgctcctttcctttcccttgtatcagggaccaggaccattcttctagttcattactgcaacagaggggaaaaatagtggagtcagagtggattccagttttaaccatgcaaatcaaccagctgtgtagcttcaagcacaacctataatcattttgagcttcaatttcctcatcagtaaaatggggattatccccatacctcatggagttgttaagaagatcaaatagagtaattctgggaatatgctctgctccatgtgcttgaactcaatggatgttatttcaatctggttgctggtatggggacagaggtaaggaagggaagtggggcatgaacctgccaagagacttgatgggagacagatcttacttctgtgtcctctgagtgactgggtgagttcgggggaccattttgtcctgggaaggctcatcactgaagacttgaaaacctctttcatttttagcaattcagagaaaggcattcaatttttttttattttcatcctggggattgcagtttacatgtgcaagaaaatgagggtgtcattctcctagttcccaggcacctaggctgattcattgcagcattaggagtggttaatggcaattgaagtagcagcagtttttggcagcaagcaggaccccaccagagaccctgggtaactcccaggtgttattgcaacctgtctggctttcgatggagctcactggttttcccatcaagctatctgccagtctcctgctttcatttcctgggcagagattcagaggtcagccggaaacccctttgcattgctgcagaggggctgatgcatccattgattctcatatttggttttgatcacagattgaaattagattgcttcctttcctggctgggattatgatagcactctgtagtttaagaaaatttattcactgtgcgttttgtttcttgaaaagccagataatttgtttctgtcctctactcaaagaaactcagtgaggactggccagactccaggagtaatgaggtgatggtgagaaaaacaccacccaaagacatgaatctttattagacccttcttgttgtgttggtggcaatattgcagtgcacaaggtgatgggtcttgatttccttctggcttgactggggtcggctagttccctcttgcggggcctttgtatcccagatggtggaatgtgtctaagtttggcaacccatattcacctgatggaataacacttccaaagtgtacatacaactgagaagatggagggggtttagcactcacgttctgggccatgtgtagatttgtgttttcattttcaagttgtcttcaagctcctctagggaggatgagtggatggaagggaatgttttatctgtatttgtagggagcttcctgagactccaaaggctggaatcctgtgactgaaacttgttacaaagaataaagtaatagagaggtgttcaaacccaagaggaggaggatggttcccaaaatttctcagttcttcataccctttgtttctcagtcattttttttcacaatgcctctaggcgaatgattgcatgtacacacacacacacacacacacacacacacacacagttctgtttattaagtagttagatcccaataagttaatttatgtcttaacagcttagtagccatttgaaaaaataggtatacattgaaagaaaatgtttttattaggccaggcgtggtgactcatgcctgtaatgccagcacttttggaagctgaggcgggtggatcacttgaggttgggagtttgagaccagcctgcccaagatggtgaaaccccatctctactaaaaatacaaaattagctgggcatggtggtgtgtgcctgtcatcccagctacttgggaggctgaggcaggagaatcgctttgacgctggagtcggaagtttcagtgagctaagattgtgcgactgcactccagcctgggtgacagagcgagattctgtctcaaaaaaaaaaaagtttttattcttaaataaccaaattagttaccagtgagatgtgtgtacctgttgggtactgcacagcatcacaaatcttggaatcaggttggacagtaccaccctgtttttgtgttccccactgattttcatgcagtacttgctttttatcacagcaaccactgaaatctcacttttgaaaagatatggcataatcagaaggaatgtagcatgatctaatgttgacactgagaactacattgacctactggtttgcagagtgacagatgtcatgtattgctgtattttccttgaaaatttaacatatttcaaaattaagttcaaattaatttaaatgtcccacagtgttcctatgtgtttgctgtggtgacccagggcccttcagcatacagctgggagcctagatcctgagcacaagatgctctcagataatccaaaacctggaggaaaggagtgcttgtctagtctcctgtccttatagtggctttcaggctcacctctgacccaccactaaaggaagatgcgccctgcacacagtgcatcaaattttatgattctagagggtgaagtgaaatctggctacgcaccgcaactagtagccctgcactgggttcctccttggtagccagctccaacaggtactgtgggacttgtttcttgtgctagcatagcctcgacctcaaggaagaagcaatcttggggagactgtcacaagctcaaggtggacaaagattctctgtctgaaggctcacaattcaaactggtcatttttgcagaatgcttctctttcctcggcacaaatgagagaaattgaactggattaagtaattaaacaatgattacatttaattaaattaggatttaaaaaaaaaatttccactcggatttttctaaagtggcatcattttcaagctgaacaagaatacgccctggaagtacaggaaaagacttctgtgcaaaattggcaacagaatccctaaatgcaagttctgggggtctagggattaaatgagaataatttaaatgggaaaaggccactttgcctccagtggaatgaaaacctttttcaaggtttacatttctgacaattttggtaaatcttcatgttttgatttgactgccagtgactggacattttcctttggaggcctagggcctgaacacattctgtcaagtttattatccaaggaggagattcctttcagtcccagatgggtgtgtggtagcaggtgggaattgccattgaaaagttgggagaccctaaatctcttttcatcagatctgaatgttggtggcaatatagaaatgcattgaagtgtttctaacaaagctgccctccctgcctagcattcagagggggaaagagggtattttgcaccatgacaacaggtgacctctatttggaattgtcaacaaacattaataggccttccaaaacacatacgctgtaatataagggattggttgcctgaagggagggccgggtattcagcagcactggggcagctcttacaggatgtcagcagacgtggttaattggtaatgattagggctgtctgcaagctgattccctaagtttggtgaacacataattgttgtatgtaaccccgagcggctttgctctttcatctatatgaagagatcagaaaagagagatttacggcttaggttgccccaagccacacatagcaggcttaattttcctttccaagggaatttgaagactgctgttgtgactagttctctgtggcttatatggtatgttgaggtcacctgcgagtttttgttaaatgattgattgactgaaattaattattctgtcagagctgtaatggcggtaagatggggtgcactgataaatacaaaagctaaagtgattcttataaatgcactatgtctctttctatttaaataaatcagacagaatacatagatcctggatggtgttgagtgtcccctccccattttcctctatagccctgagctgttttctttccaaatctgaagctttgaaatgagcggctatttactcaatttaactgcaggatatttgaatcctttgtcacttcattccttctaacctttccccaaacacctcagcccctgataagaggctgatgcccatgactgccttagattaaatcaactgaattgagagtctgtgtttgagctaatggctaggcaacttggggaatgtggctggtgagttggagagtggatagaaggcaggtgtttgcttctaaatgtcagatttctgaggcatggaaaccaccctgtagggcccttttaggagggcagtgaaagcagctgtttagtgacagactgtctgcagtttgggtccttaaatcccatgaagggattccagtggctggttaaggaaatgccaaaatgactctttcgattaccttgcaaagggcatgagattatttataagtgatgtatccaacttacttccaagtcactggaaacgatcgttagaaaaagccttttcccacacaggccctgatcatgacaaaggttccaggacatcttctgggagtggcaccaggttcaaaatgagcaagaacacatgggaggtacagaaaaagacttgtgggcaaattggccaagacagcagaataacaaacccaggtctcgcgtgcggtatgcctgtggggaaaacatctatggagtagggtcgtctagtcctttgtgtaagtgtgaaaaacttgttggcattggatagggtgatatgcttcccaagtctgttaccaacactcctaagttaaaagtaaacagcagtcacttgcttccttggttcttagattctagtgtgctcttttagaatattctagagtgcttgttaaatatgcagattcctgggaaccacctccagtgagtctaatttcttagatatgacacagagcttgggactcttcattttcttcagtaagttccatggtgattttggtgcagattgtcccaactgtccagttctttatttaacaattgatcagaccaggggccaagagaagaaactacagctgttccatttgacaaaaatagccctccaaaaggcctgcgactagtcaacatgcagatggaacttcttgagtttgagtaattttacgcatcttaagatcagccctggctatttcaatgccaatcatcttgaggtataccagctattgaatgcatggctccctgaatatctcagaaaatgaaatggttaaaataggaggggtattgaaaattgctgtttcttgttgatagttaaaatttcattggctggatgtgatttaagcagcaacataagattcatttaaactgtcataaattaagacatcctattatggagggaaattttttagaaatctttcccagcaatttctaaaaagagtaggactaacttggaactctttgtagtcattcctgctaaaggtaagaatgggcgtgctctctctagtctattaccctgtgatttagttaggtagagctcagacttgcactgctccgaacaatgtgttgtgaagttaaattgaaggcctgaaaaggtatgcatatatcccactactttatgaactctgtgactcataatgccttacaatatatttgaaagcaaattaaagactttataaaatgtttttaagtatgcccctcctcttttaaaacatttatggcttctataaatgctatataaaatgctttggagagtggtcatcgctggactaaggctaggttgcataaatatttagttagagatatgagcgtgtttcttgaagctgtacatgtgtcggagtttccttgctgttcctgcaaagtcaggcctgttagcaatgtgatggaagataaaggaagcggggagccaagatggaaatgcatatttgccatcgcaggggatagtgctccattaaagtatcactgtttttgtttctgtacttaaaaaatttaaacatgtctttgattgcagactgttttcattgtgtcattttaaataataattaggctccctgcttcaatcattctcttttaaagtgatttcggaagtccatgactggaaagatccggtatttaaaggaaaggcacctctgaggctaacaactggtggtgtcatttgaccaagaactttcccagaaaattcatctggggatccttaggctcttttagaatattgagttttgttttattgttatttttaatcccaaatacaccagatgttattattatcgcatatctctgggaagagaagaagctaagatgaatgtgcccttattttttatgtacttctagtagctgtgcaatcttcaatgacagtgaacagaatatatgcccatgaaactgaccagaaaacaaaaatgtgttgctgtctgcaatgtgccagtcactgtgataggcagtgagcttcaaaaatgagtaaagcatggccctagggagtcagagatccaagcagaaaattatagtaaaatgtgataaaatgtgtataaggagaggcctgcagcaggagaagctaattctaactggagctttcaggagaaatgatgactgtaaagtgaggaggtagaatctgtgtattcattatttagcttgaaagcactaacttgcgtcaacccatacttgatattttgatggtggacaaataatggcatttattcaggcagggagtagagccagtgcaaaggtacagagacttgaagggacaggatatagcagaaaattagtggtgtgcagtattgcttgagcaacatttgcaaggaggttggggttaccactgggctaagaggtatacagggactagagtatgaagaattttgagtctgttgcagaagtgcttagatttggcctgtttgtagtaggggaaccactgagttatttcggatggacaagaacaggataagatttgtgttttgagaaaaagtttttggaatcaggagcatctcaattgcatcccatgcccttggaaaatggaagggaaaatctgaggctcctaacacttctttcctgacatctgcttccattatttttttgtcatggggcagtcagggatgcctgggctctaacactgtttgggtatccgggtacacaaggtaggatgaagagagaaaggaatgaagagtagaaaaatgaacataatagaattatgagcttgaatctcacataggctcacatgtccaggcattattttgctgctttgataatacttgtggcacacatgggaatcctgaaaggtgcaaagtctcatgttggatctgtaagatgtagcttcttagcttatgaggcagttggaaaacgttaggctttgttctctccagtgcttaagttattcactggaagtgctctagctaccatatcaacctgtctctgcagacagaccatgggtcagacacttggatggaaagtccaatatgtgcttgatgatccagaaaggagttatatgaaaaaggaattttttatcaaaaggccacaaaatactctatcaaacaaagtcaagcaagcttcctttctttgcagcttctcaagcctttaatgttccaaagtacaatatgaatctccaagacaatgatggaatgtgtcctaattttatataatttcctaaaattatttgtgaaaacttatttttttctacaaagcatcttgtgaaacttgtgtttcctgggatgctctttggtcaaagccactcttgagattcatttttacaggcctcctaattgtacattgaatggaattcccttcatcaaaagttgtgcctactcagttcctaaaatgccagagggagtgaaaaccagaccattcagcaaaaacaaaaggtgccccctactaataatttgacatcatgttggtgaaacaaaggcttgcattcctcccattctaactggttgcttttgcaaagacacaacttccggttctggtgggcagaatggggtctgttgggaaggttccagcaaaaggcaactcttcttgaccttgtaccattgaaagtcacagagctattaaagtagcgaccagggcattcagaagagctgtgactaggcataatgtgccttttgagggtgaccattcatttgtccatctaattagcactcagcacctttgattgccccatacatctttaaaaaattcaaataggtagtgaaaactgcttggattgcagggctcagatgaaaattgaggcctggccttgtatttatggaggtttcttctttccaggacgtcttacctgtttccttagccctgttctcagtaatgcctgccacaaagaaccccataaatttagcatttgcagctataagtttgtcattcttttcttgaaataagataagggtactattataaaacagcagaaggctgaatgtgagagcagccgacatattgttgactgattcatctggggcatttagttcttcaaaatggaaaaacaaaatagggtctaaaaagcaaacacagtaaattaaaggaatgttattctatgcatagaacagctgttttaatacttgcttggtagggtcatgtgactgacccacttcttttaggataaaatatgtcttcctctaaggttattattaaagacacatggagacatttactttggtctccttgtcagcattgtgccacattacaagaaaatacaaaacaccatttaaattgggtttagatccttcatttgcatgaaaacgatagttaattgtgtccctgtgatgataattagtgttcagctaagaggaccttttcattgttggcccgaggtgaggcctgagttactaagaattgtactggtggtagctgttttcttttaagtaactgcacagctctgtctgttttgccaactggcaaaatgaattaacaggaagtgaaacatttagtgtttacatgagctaggacattgttacccaacacaaggagaaagctcactttgggccttctttggttatgggatgcttattgtctaatttcttcagcaaacatggagtacctactcaatattaggacctggtgtgccctgcacaattagaagctctcagagagcagggactccacagtagcataattgaaatctctgttcactttgaatcctgaactagaaatgttctcacccacctgaggcttgaccatgttttcagagctgccacgtggcaggaaaagagtccaaatctgctccttctgcagtgatctctccctgtgctacttccttacactgctttgctctgtaccagccattcaggaagatttatcaagtggctagttattatagaacaggacagaatactgggccagatcccccctccatcccacttaactgtgccttaatcattaagtgttctccagttgacctctctgtgaactcctaaaaggtcaagaccaattctgtttcaccttagaacatgcaattctgtagtgcattacatgcatgcaattgcattatatccaacgtgtaataaatatgtgctgaatgcatgaatgagagaatgaatgaatgatcttgccgtatttcaacttagcacagggtccattctctacctttgtgacatctagctacatcttgcgttgtcttctggtggtagggtcctggctaccttatggtgcaacccttttctctatgggcaactctgactgtaaaatggtcctttctctttttaatatccagtcagctgtaacatcacggggtctacctcctgaagccatgtggagtttggtctgattcctctttcacataattcttcagctattggaagacacctggtatatgtttctcatctccatatttaacataacagtttcctcagttggtcctcatatgacatggttccccaatacatctctatctttaatgctttcatatcaacatagtaatttaaccagtggtttaaaaaaattattttattttgttttaatgagcgtggagccagaactgagcatagtatttcatgaaggaatgatcagggcagaatagatacagatcattgccttcctccatctgaccttctgcttatactatttttataattggggactgtacaattcattattttattgcatttcattttcagcagtcatgccattgaattgattcatacaaactagcggttatctaaaccagtggttctcaagtgggggtgatttttatctccctggagacagttggcaatgtttggagaccttattgattttcagtactggcggttggttgtgacactaatatttagtgggtagaagccgtggatatggctaaacatcctacaatgcacagggcagcccttccacaataaagaattagctgtttaaaatgttagtagtggccgggtgcattggttcacacctgtaatcttaacactttgggaggccaaggaaggcggatcacttgaagtcaggagtttgagacccgcctggtcaatatagtgaaaccccatctctactaaaaaatacaaaaattagccgggcatgatgacatgcacctgtaatcccagctactcgggagtctgaggcagaagaatcgcttgaacccaggaggcagaggctgcggtgagtcgagatcgcgccaccacactccagcctgggcaacagagagatactccatttcaaaaaaaaaaaaaattgttagtagttccactgctgagaaattctggtctaaactacacagtctttgtccttggggcctcctgaagtagaccttgatcccaggctacatgagatcttgcaaatctttaaaagtgattcagtaggaccatgtccttgtaggtgaagcttttccaggccctctgtcaaccatttcttccaagacttctactttcttaactttctggtcacccaccttgcagttagagcagtgctcctgggatggaatgctttggttgtcatctgaagcctaggacagtgcttctcaaactttactgtgcctagaaaccacctggagattttgttaaaatcacattctgattcagtgggtctagggtggaggaagactgcatttctaaaaagctcacaggtggtgcctggggcagaaggccagtgggccgcactttgaggaggaagagtcttagcatgttttctcttggcattgtttggacaaaggctttttccattcccttggagcagagtgcaagcctcttatgctgggaacctttgactgtcacactcagccctggccatgtgtcaggacagagtagttgagcaccatgatgttataatgctgaagaagactaatggcctgcttaattgctgagcagtgtttataacttacaggtctttgcatcgccctattctaggttaaggagaaacaataacaaagcgatattactctcctaattgaaagttggagggtggaatgaaggaggagctgcccccagtcacagacttggaggaatgaactatccagttgtgagctggtttctccagattatgcatatgtttataaattatcctaggtgttctttttcctcattccttttattgtagagtgtatttctttaaagtgacaggttttatttttttccccactctgtgcagatttcgaggatgatgtagcttaataaatcaaactgatttctactattgtatgaagactccttaatcagttctttgaattaatgcaatcaaatggttgaattcttacattcatctctgtatttatggctctgttgtgcttttttattgaattggaagaggaatatcttcattcacagccaaaataaaataaatctaggcaggttatctagtaaaatgactaaggtatagggtatgggatgtgtatgtgtgtgtgcacttgtgtgtgaatgtgtgcctaaaaatacagatgtcatctgtgtcgttctaatattaaattttgttttggaacttcatattcatgaagccagcattatgtcaaactctgtgataatggtcctgtttttaccaggtcatgaatccaggggttctcaaacatgttcaagaagcagggcatttgaaaattatggtgtttcttgagtgataccatggatttcatatgccccggtttaagggcacaggctctagagttaggcaacctagaggaattcccgtttcctccatggactggctatgtgaccttgttacttaacttctctattcctcctttcccttatccttaaagtagggataatactgaagtgtctatcttgcagaaccatgctgaggcttagaaccacaggcatttacttgtatccttgacacccatgcagcaagtatgtgctacgtggagaccattattagtattaacccaaacttaaaacggctaaatatagcattttctgccaaatcagaaatgctatcttatggcacattctctcagagacaatagtcacaggcactgaggatgtaagaaaaatgattagaggacaataataaaattgaaatagtgctatcctttaacaaattgggaagctatctccattattgagttttaatccaggatcttggcagacacaggagtttggctgagagagtttgtgcattagccctaccctgctttttcacgtgctctgaagcatcctgaatctacaacatgtgatgcacattgaaacctctttctttctgattttacaatatcagtatggtacaccgatcaattaaaaatactttgtaaacatatgtggagtaagactccacttcaaaaaaaatttttttgagacagagtgtcactctgtcacccaggctggagtgcagtggcacaatcttgccttactgcagccttgacctcccaggctcaagtgatcctcctgcctcagcctcccaagtagctgggactataggcgtgtgccaccaagcctggctaatttttttttatttttagtagagatgatgtttcatgatgtttcccaggctggtcttgaactcctgaactgaagcaatcctcctgcctctgcctactcaagtgctgggatgacaggcatgagccactgcatccagcttagacctcatttttaaaatatggcaggcatacatctgaatgtatgcatgtttaatggagctaatgatagaaacgttagagagtgattattctaattactaaacaattcacaggatttcttaccacagcaaatgcctttcatgtctactttttgccagtttataatatggttcacaaacataaaagttctctgtcttaaaattctgatgccattcatcgatctagttggatgagtttttattacttgcataagaggggattggggtgggatggtcatatgggtttgtaggcatctacaaacagcatgctgtaaagtcttatttcttgagttttcaccagtagcaatagtcttattgctaatcgacttcatcataaaaattgtacttgatattggatagcatgccacatattaccaaccactttcacgtgtatattttttctttttctttttcttttttttttttttctttctgagacagggcttagctcttgttgctcaggctggagtgcagtggcacaatctcggctcactgcagcgcctgcctcccaggttcaagctattctcctgcctcagcctcctgagtagctgggattacaggtgcctgccaccacgcccagctaatttttgtatttcagtagagatggggtttcgccatgttggccaggctggtctcaaattcctgacctcaggtgatctgcctgccttggcctcccaaagtgctgggattacaggcgtgagccaccatgcctggccaattttttttatttcgtaacgcttagtgaccccatattattagtattattatttttatttatttatttatttatttatttatttatttatttatatttagacggagtttcgctcttgctgcccaggctggagtgcaatagtgtgatctcggctccccgtaacctctacctcctgggtacaagcgattctcctgcctcagcctcccaagtagctgggattacaggcatgcaccaccacgccagctaactttgtatttttagtagagatggagtttcaccatattgtctgggctggtctcaaactcttgacctcatgatccgcctgtcttggcctcccaaagtgcagggattacaggcgtgagccccacgcccggagtggccctatattattattgaagaaagatacagagagctgaaatgatttgtcgaatgtcacatgacttgtaagcaccagagctaggtctcataccaagttctgcttcttccaaatccgttgtccagcttgttgggtatgtctgagtccctgttagccacaatgccataattgttatagtgttcttagagtagagctcagagcctattatgttgcatctgtatctcatcctcacctcttcttttgttggatacatttttcatgatttgctgaggatattgtggacttagtgtcaaatatttttcaggtcagaagttttgtagcccttggaaatcaaccaataacctatgtaaaactggtgccgatgtttctgctgagagcttcagaactgctatatcaattagcttttgctgggtaaaaaactactccccacaattagtgacttaaaacagcaaatatttctttagttcccagttgtgcagattggcagtttggactcggttggatggttctttgcaatcagagcggtcctggctcttcttggctggtctttctcacaggtctttggtctcagctggggaccctaggatggcttatatggctggggtctctcttcatgtggcctttcctttttcagcaggttagtctcagtgttgttcacatggtggcttcagagttccatgagcagcaaagaacaagccccgtacctttcaagtctgattctgtcacgttggctacttttttattgctcaaagctagttatgtggccaagcccagagtcaacataagaagggattgttttggcgagaaatcaccagggacacagatacagggagatctgaacaaattgagagccattaccgcaacagtctgttacactgccacatcaagttttcctttccttccaaactttttgagtgaagttctaatgccctgaaaacccaggagatactttctcttcactgaggcatttccttccctgacttcctccatgggacagcttggcattaatgaattgaaagattgtccttagtcagggcttttctgacttcttaatggtgtgcatgtaacttctccttgtcaggtttccctttagaaatgcatgcatttatttggaatccggatgctggagttttctgtttggaaaagaattttaatgaaactttatcaggtgtgtgttcaccaaaatgaagaggactcttttgtgtccagagaaagctatctggcagtcaggagccctttagaaaaaggactgcagaatgaaggaaagctaaacctctctttaatgattttctctttttaaaacatattactttgcatgaaaatttgtgtcaaggagtttagctcatggaaggggaacttgatgtgcaatctggaggaaggagcggacactagatgataattctcaagcagatgaaagagaatatttcacattgctgagacacatgtgacttctttggatgcaaataacagaaaggttgatgacagttatccctgttccctgctctgcggagaaatcaccagcttagcaacactaaatggcaaggcatttgtggctgagttctttctctgactaattggaaacacatctctctattttcctgccattgagaaagagctactctttggtaaatggtattcagtggtttacttttctaaaaactcagccctgtgctgagcttttggtcagaagaatggaaatgctttctaatgccagagagcatgagtactttttgtggagacagtgggatccattagaaagtgactggacattttggagtcccaacttggtagaatctcacaagttctgctccctgtgagttcaacaacttgaacaaatcccttctcttctctggcctcagcttcttcacttgtaaaatgagaagaatggagcaaataatttcaaagggtttaaaaaaaatgtttttgaatagagactgcgtctcactcactgtgttgcccaggctgctctcaacctcctgggctcaagtgatcctcctgccttggtctcccgaagtgctaggattacaggcatgagccactgtccctggcccaaagtattttttaatctctgtcaggtcagactataatttggaaaaatatatatttaatttttggttataaatttaggattttgagatttggtgattcggagaagacattgtgaaatacttactgggtttatggcagaggacactttgtaaaacaaaacaaagcaaatctctattcttgccctgatagggattgtgccacccatctctccatgtgcccgtccacccatctctattccatgtgcccgtccacccatctctattccatgtacttgtccacccatctctccatgtgcctgtccacccatctctattccatgtgcccatctacccatctctatttcatgtgcccatccacccatctctatttcatgtgcccatccacccatctctccatgtgtctgtccacccatttctccatgttcccatccacccatctctatctcatgtggccatctacccatctctccatgtgcccgtccacccatccctattccatgtgcccatctacccatctctattccatgtgcccatcccacccatctctattccatgtgcccatccacccatctctatttcatgtgcctgtccacccatctctattccatgtgcctgtccacccgtctctattccatgtgcctgtccacccatctctattttatgtatccatcaacccatctctccatgtgcccgtccacccatctctattccatgtgcccatccacccatctctccatgtgcccatctacccatctctattccatgtgcctgtccacccatctctattccatgtgcccgtccacccatctctattccatgtgcccatccacccatctttatttcatgtgcctgtccacccatctctattccatgtgcccatccacccatctctccatgtgcccatccacccatctctattccatgtgcccatctacccatctctattccatatgcctgtccactcatctctccatgtgcccattcacccacatatccactaccttcttattttcttcatttgttccagacattagtgttaaggtgcttaacttctttaatttatccagctcttgcagggaaacaagacacagtttttaaatagcaaatgaggaaagtgaggccacaaggttatatcatttacccaatgtcctcagatggtataggggaaaattacgactaatccccaattgtaggtccagggctctttccctaagatacaacacttcttttgtgcctcttctaaaatgtcctagaaaagccagaacctgacatctgtttcttaagtttggggtggcccaaggtcccaatctagggcttaattgttgaatgagaaagaaatagggttatttcctttccggaagaatgttatttgagctgccatcctccaccataaatgaagatggtaggtttttgagcactctgtggctagaagaatgatgaacattatgagagatccagaaaaatcaggagaatccctggcttctggagtttactggcagagtctgatatgacagtgacatactcatgacatcacccatgacagtgatatatttgacaaatgagggccccacataataagtagtcattttcatagtacttaagaaaagggagacagaggcccctagcaaccgtgggatcctctaactgccagaggtagtagaggatgcctaggtcccaagagcgcacttaaaaaagagaggaaaagccacttcttcctaagtaactttctctggaaagctgtgatgtccctccagaggggcttaggacagaggttgttggacccggaagagcatatttcacctaaatcttggggtgaaaacacagaccagatggggtgcctcttctgtgtctctccatataaagaaggatatatcctgggtttcgaggtggattcaattcttaaaacagaccccatcatccaccccaggcaattttgtttgatcccaagttcagtaatgtgaagtaaagtttcccagactttaatggcttaaaatgaaagagaatcatgtttttctgtctgaaactggaaatccaaagagttgctcagtgagaatgttcagacttctaccttgaggctcagctacaggaaattgggaaatttgggtcagatgtctcattcacattccaaattgataaagggtgggaacgtttggagaattgtctgaatcataatgctactgagaaagttagaaaatataggattattattccctaaattacttttctttgtgggggtgcggggtgaaggggaggaggttgaggagaaattgtcagtatgctctagatggcagagagtggtgtttcatttagctattccagtgggtggattgtaccagtgtagagatgctgggccttcctgttgtgaagtaactcttgggggaagttggctggtggtaggatatgcagatctttgctactgaaaatggggtctttgggccagcaacattggcatcaccagggagcctgtcagaaatgcagaatcgttgaggccaccatcccagacctactgaattagcatccaccttttaacaaaacctcccagtgacccatacgcatgggaaactcgagaagcattggcctagataatcatccactgggacgatgaaaggcacacatcctctccttcctcccgtcgatcaaaagacgcatctggattggtttcttgattttgtcgatgatgacctaagagaaagggagtttaacctccaggagctgaactcagcagtgggactgtgctgcctcatctccagctactaaccgttctatccaccctgaccctctcactgttctcagaacaggttggaacctcttacgacgttgtgcttgtcccactgcctggaatgctttttctctctttcctcacacatcaaactcctgtcacctttcataagcttgctcacatggcatcttttctgggaaacattcctcattttccccaggtaggattaggtactgtaccttctgtttacttatgcctctaataaattacagtagtacaggaaagtatgcatgtctgttttcctttctggactgggaactcctggaggatcttacaccccttgtgatcacctctgtgtcctcagcccctaacacagagcaggcatgtaatccatatctgttgcatggctgcatgaaaatacaggtgaactggctgtgaatgccttttgtgggactctgggaagttctcgttcttccaggcagctgtgtgggctgtgttaatcataaatttctggatccatgaggctcccaagttaaagactgggtcagcactgagcaaaattgtcaagggagatgggactatccagtaaccactttcccctctcatgcctggcatacctccgattgccccagactttcatgcagcccctgcactgaggttggttccctgtggctaaattccacccctcccaaatcagagcctacctatctccttaaagagtcagtgcccatttgtccggggcttgctatgcgccaaacgctctacagaaactgctttgtgcacatcatcgcattcagtggccacaacaattctgtaaacataggcgtcatcatttccatttcatatggaggaaactgcagtttgtggtggttaagtaatttgctcacagcaaggtggtcaggcagagctgggattcaaactcaagcctgtctgacttactaattggcactttgaaatgctactctgtgccacaacaggggtaatgaatcagccggggaaacccatgaaggtgctaacctaccattgtacataattgatcaaaacacttgctctgaacagtgagctgttttagatacactttaccagggggaagagaataattacaagtgaccgcagtagatgcctctatctggtcgattctgactttctcaagctctgactagcctttaagacattctgtttctaagactgaggaccactgccacaagtctcagctagttcagggatcctacgtctgtgaagccctgggaagggggctgggagtgtgagctgccattttgcctttaactttgtcctgttagttgagaaacatgccacattattactgacttaagtatttatttttggttgggggatggggtgattttttaaaaaacaatgcccagtgtgtgtgacttctgcacatagtcatgtgagtcacttcctgtttagtggaagccctctttatccacccctacctatccaatgggatcatctcgccttttccacctcctctgtcccctccataaaatatgctcactggtggtcgggtgtggtggctcatgcctgtaatcccagcactttgggaggccaaggcaggcagctcacctgaggtcaggagatcgagaccagcctggccatcatggtggaacctcatttctactaaaaacacaaaagttagctgggcgtggtggcacatacctgtaatcccagctacttggaagcctgagacaggagaatcacttgaacccgggaggcagaggttgcagtgagccgagatcaggccactgcactccagcatgggtgacagaacgagactccatctcaaaaaaaaaagtatgtccactggtgttcctgttcccagtgagaaggcacctccctctagaccttccatactcagctgctctcaccaagatgcagttacgtttattcccaaacttgtttatgccagtttttcttgtacaagattggtaaacatagttcaattaaatattatataaaccaacgaactatgggtacaagactaaagagctgtcattttatgatcactgagttaaatgctttggaaaaatttcataaagcaaatgttaccgagtttttttaaaaaaaggaagccaacaaattatatgagagcaggccaagagagcttaaaacaagaaaggcagaactttatcatctaaagtagcctgtgctcagtttgcctttcaagggtctttatactctgctccattttaaagaaaccctaaactggaaattggcggggggcaacagtttatgagtattttgggataaaaactatgaagtgggactaatcacagggcagccagcaaggaaacatggacctcaatcccggagcccagtggaactgaattctaccagcaacctgactggggctaagaagggacagattctaccccagagcctggtccagccagcaacttgattttggccttgtcagactcaatgcggggaaaccagctgtgcccactggcttttgaccttcagaaataggaggaaacacatgtgcattgcattcagcagtgaagcccagggtaatctgttagagcagccatggaaaaccaacccagcaagcatgtcctcccctctgcttgtgcctatccagaccaccaatcccatatttttcccaggccctttcaccacactctgctcagtatggctttccaggccctcggcactggtgttgcctcagctttgcttttaaaacttgcctttccgctgggtgcggtggctcacacttgtaatcctagcactttgggaggccgaggagggcggatcacctgaggtcaggagttcaagaccagcctggccaatgtggtgaaaccttgtctctactaaaaatacaaaaatcagccaggtgtggtggtgggcacctataattccagctacgcagcaggctgaagcaggagaatcacttgaacccaggaggcagaggctacagtgagctgagatcacacccactgcactccagcctaggcaacaagagtgaaactccatctgaaaaataaatgaataaaataaaaaaaaacttgcctttcacacaaactgtctcccctaataagctaaggagagtcactctcacctaaaaacagactgtgcttccgtgcctctgagcatttgctcagtcctgttcccctcctcacagcctcctagatacatctgactcatctttccaggcccagctgagacccaggcttccctatgcaggtcgcctccttgtgtgactgctgtggcctgctgagaacttgctgctcatgtttccctctgggccttcgtcttctgttgggggtgttttcttctctctctggattgacggcataagaattagtatattgtacgtgatccatggctcctgtgagggactggatgttaccatgatccatacaaacacctgcagagctcttttgtatgtagtggttgatttctggggtccttgctttgagttatctctccttcaatatcaagataaggatttgatctcttctaaagtgtcttgtaaatgacttctttaaatgatttttgttccaaagaagggtgtctctctgaacatggagccagcccctcggatttgtggctgcttccattgctgatgtatcacgtacaatcctgtatgaacatccattgtgtgtactctgagagagtgtcctatagcaccagcacatggggacactatccagggagagatggcaggatgctggggtggggagtaggagccagggaatattttgaaagcatttgacttattttccactgtagctatctattcttcattccatgctaatgggataatttgatcaatgaatgaactgggaaaaggcaggagatgcataaaaagtgtaaaagcgcatagctacaaatgagtgggcagatttaccaccttctccccagaatcagatctgtctgccatccgcaccgggaatgagacaggcagatccgagctttggcttaattacacataatttgggtgacagctgaaatgcaaacctaaacattcaatcagttaaaaatacacaaaattaagcatttcacacagtgtccaaccccttcaatctttattaatactttaattatgttaattataccatggtttcaagccctgctactacaacaagcagggggtggaggtggggaagaggcagtcctcgagctaaataatgattgcattcgaattaaaagtaggaatggaatgcaaagtagcaaagaatcacaaatacataattcagcagtttacccaccctgttcacacttctttttttcctgcctggcagtgtttctgaagggtgggtccaagtctgactcatcctctgagtgtactgtacatagtaagtgctcagtaaacatctgttgaattaatttttcatcaaggatgctgaaattgtatccatagatataaaaagatgtgagcagatgtttgggatatatatattgaaatggcggtggccaatattatggctgacagttatttgtgggttagtgggaacagtggtggtgcagggggtaggggcgagaggaagaaagagaggaacagaaaatgaccaggattgcagagattcatcacccttctatgaagtcacttgatttctttggactcagtttctccgcatctctaacaaatgaggaggaggagattagaccttaatggttatcaaactttgttctcctggattcctcaaaggaacatcagggactccactgcgtatgtgtgttggagggacatctggaggataaggttctgctttaatttatttattggatgtctaagagttttattctaaaagttgcttaaaaatggtttggaaacttctgcatgtgatagcctttttaacctctaactcacccactcacagacagtctcctgtgctctggttggagggtttccattggtccaacacttcacctgtcttgtcctttgtcctgggtatgtgggtcccccttactcatctgcttttctagcccccatgtgattttacttttcaccttccatgtctttgctcatcttgggctgaaatgtccttcctctctgtctgcacctatcaacatcctacagttcactaagcctggtacccagttgcctcctctggaaagacttcctggactgcacttgtcattggtgctctctcctctttccagattcctttgattcacagtgcctgactcacattcctcctttttttcatatgtgctagtcttgtcttattgactagataatcaatttctcaaatgagaaacattcagccttctcttgagtctttcttccactctgccttagactggacacataggtgactactcaagaagtcttactacacatccaatagcatttgacagggagttagccacataaaatccaatgagcctctagccagagagaattcagttgctgaaactacaacaatgaatgactgtactttagattttttactttatagtttgctgagctgaaaccaaaatgtcacttgggtgacttgcacaagataggtttttaggttttgctaggctgacatgtacagaatcatcagttgttgggagtgtctttttaatatcaacagagaaaaccttgaagattcataaatctgaaatagaaatgcagtgtttgcttcaaagagcaattccttagtttgttgttggtgagaactggctctgtgactgtaccttttgcccaagtatccttagctaagctaaatgtcttcagagtctcacaaatagttctcatattctgtggttatcactactgagattctccctggtgcacagaattgacattggagctctccatgtagtttttggtggccggctcaagttgctgtctcatcactccttaactctacatcctacaagtcaccaatgtgggggcaaaggttcaaaaaggaaccaattcactagcttcttggttcagcaacaagactctcagcatcacagaatcttatagattatcaaaaggaaacatagcccaagtccattaacctacaaatgttgactattatttaaaaccaaactttattacaatggagaatacagaattaacataggatacagattttgcactacagatttttctttttgtatggtgtgaaaattaaaacacacacacacacacacacacacacacacataaaaaaaaaaaactatagagaaatataaaaaatgaccaagtgctaactatggttcccaggtactatgagaatttggaaagaagaaaaatcattatggaaaagtagaaacagctaagttgttgggtccatttttcacactcaaaagattttttttctaattattgcttctactcctgggcctcccttttttttggaaggaagtgtctgccaaggtacatctgctgaacaataattcattcacaccccaataaaagtatgaatattaccaatcagccctcttgcaaacaagaaagagataaccggatgtccacactgaactaatgataatttcagccaaaaggcaaagaagcttcatgtttttatcagcctttgtatcttattgcaagtggatgcattatttgttgtcatttgttggtttcagatattgaaattagctttcagaaaatctgtgtactacattgtggggaccactaagaatcttccacatggattgggaatcctgtgccaaggagtttgctcataatcatggaagaagatcaagatcagtgtaggtggaagtgacttggatcttgcaataactagggcttggtcaagcaatgtgggggtggggggatgtgccaaggaatcaggcaatgtccataaattcagtcccttttgtgcaccattgctgactgttccaaggccacacatctgacttcccattcctcctaattttgtgagctcgtactccatgagtgggagaagatggatcaccattttgtgaactgtgctgttttgcatctcaccccaaaaacgcatcccaaattgagcatatgtgatcttcagtaacattcaggaatttcccatcacttgaagtctttagttacagccacaccttttaaaaacaaaatagatgattttgaggatgtcattggctaatttgcagacctgctttgcattggcatctagaccagtgttcgttactggaggcacatctctctgtcgggtgattcagactgtatatgagattggggggtgtaccttgaccacatcaagttgtgaatggaagatgctgccttggtaattttacccaagaccctggttgtatccatttaataaaattagaacatgtatcatttgagaagggaaagtaattatctctgttagttgtaatctcctcaaattcaaatgcatgacatagagatttctcttcaatggcacagttatagacttggtggttaattaaacatcttttctaatcaaattagctttcatttcctaagtggaggtttttaacctggaagtggctttgaaacattgtttctttcagccatcacctatgaaaggaaagataatgtcccttcaaaggactcctctaacagtgaataattattctttgtttgactgcaaatgcacattcttgaaataatatattcgtaaagtttcataaattatttcaagacatattaaagagcattggaaatagttctactccctccaggaggttgccaagaaaaagttttgtcctttaaaatttgaaacaaattattattcactggggggacatcattggagcttcccctagctccagctgacaggaacaatttgagctaacctgttaatggtaatgcttttaaaatttagagatactcttaagtggagcaatttttaaaaattaaaactatagctagggggaattgcctttggaggtcatgcaatgttagggacactgcacatctacctggatcagggcctggattccagctgcctgggttgcatgttacatcatggcccatggaggtgagggagacaggagtgtctctggttgaatttcaactaaatgctcccaggcataattctcctgagacttgcagcttggctataaaatacagcataatatagcacaaaagctactgtaattggggttgggaaaacggagttccagtcccagaagtcacataacgttgtaaaaaatccactattttctcatctgcacaatgaaagaattggcttaaataatctcccatatcccttctaactccaacattttgtgcttttactgtaagatgtcacttgaaccaaatttttttttttttttttttttttttatgagacggagtctcctctgtcgcccaggccggactgcgtccgcagtggcgcaatctcggctcactgtaagctccgcttcccaggttcacgccattctcctgcctcagcctcccgagtagctgggactacaggcgcccaccaccgcgcccggctaattttttgtatttttagtagagacggggtttcaccttgttagccaggatggtctcgatctcctgacctcatgatccacccacctcggcctcccaaagtgctgggattacaggtgtgagccaccgcgcccggccgcaacatcatttcttaatagctcattttgtagcttacctggtaagtgataactacatttctgaagacttattgactagatagttatggcatggaacaagccttatatcctcatctgaactgaaatctctgaggaaaacaagaaaacaagaaagcaaaggagaccagcacttgcttgggcactcacaatgtggcaggagctgtacttggtgattttggggcttttgttttctgctattggagttgaatgaagtgctgggaacagcagaactctccataaattctgcctggattaaatgcaaccacctgccacataactaatggggcccaagtttagaaagaaaatcagtttctttgcagctgttcttacaacctgcctgttgttcttcagaaaccaaattccgaaatatcatctcacaggcagttaaaatgctaaatgaggagcactgggttgagaatggtgtagtaaggtgatggttgggggatgtcagcaggactcaaagacctgggcctcagctgtttctctcatcagtttgctattttacacattgacttgagcatggacgagagtgttcaggagcaaataccttttaggtagcagactgagcatgtgcaggtttgactcttcttgtgctcctaggacagagcaagtttcattttgagggatgggaggaggtgtaccttgctgtatctgagatggcaaatgcaaggcacgtgttcagctatccccatatctggcagacattgctaatctatgatggctctctttctgagctccaatagcctcagaatcctttcaacagagctttctggacagccattatcaaatggcaggtgttggcacaggagatgaagtctgtttgtcaagatttgggctaagtagtagattctttcttgaaaaaaaaaaaagtgtgcatccgtcacatttgtgggtaatccaaagcccttttttagtttaagtgcaggacaggacttgactttatagaaggacacagtggggatcatttttcttctacatctgaagttatccatgtcccaattctacttaaccacgttgttcttgaaaaaagagaaattgggaggaatttcttgtgaattgatctgtagttgcctgatttataaaatgggtgtaagtgagaatagattgataaaatgtggtggataccatggactatctacagtgactagaatcagcaaagcagaggtttatatcacagcacaatgaatctcagaaataggggactggatgaaagaagaaagaggatgacacaataacaatatgacttgcataaatttaaaatgtacaaacagcaaaaagatttccttaaaaagacataaagagggttgactataaaagattgctaattctggtccatttaaatgaagaaacttgctcatcaaaaatcagctttaagaacagaaaaggcaggggccaaatgtggtggctcatgccttttatcccaacattttgggaggccaacacaggaagattgcttaaggccaggagttagagaccagtctgggcaacaagcaagaccccatctgtacaaaaaataaaaataaaaatagctggacatggtggcatgtgcctgttgtcccagctacttgggaggctgaaacaggaggatcacctgagctcagtagtttcaggttacagtgaggtaggatcatgccactgtactccagcctgggcaacagagtgagaccttgtctctaagaaaaacaaaaaacaaaaaactgaaaaggcacattgtaaagtagattttttcattatatgcaaatgataatggatcagtattaagagtatgtaaagaactcctataaaccagtaagaaaactacagataactcaatagagaagtaggcacaagatggagacattttgcagagatggaaatatttatagccaattaatttgtgaagagatattcccaacattagtgactagggaattaaaaaggaaatgtaagatatttttcatagacaagactggcaaaatttttttcaaaatcaaatgttggagagtatgtatatctacaggaaccctgctatgttgctgatgagagtacaaattggcacaatactttgcaaaatttctcttttaaagttgaacattaatgtagctcatgacaccagcaattccactgtacaacaggaggcatgtaaatgttcgataggacgcatgtaaagaaagtctttagaatactctttttcgtacctaaaaaccaaaggtctaccaatgagtgaatgaatgaattgctgtatgtattttcaatggactattatacaccagttaaaacaagtgaagtggcatatgacaatattgtatatcttgtaataggtagaaagtgaaaaacaaatatatttggtaaaaattaagataatagacatatccataccagatgcatttaaacaattgcttgtgagggggcaaatgagaatggaaatgaggagaaaaggaaaaattttaaaatacaaatgtattattatatacatacattttatatatgtgaatgtgtatgtatcgatacaaatatgtatgtatgtatatggtataataatatttttccatcttcctcattgttaagttgcatggctcaactgcaatatagtgacatgattgaagagatttcatggcttcattcccccaaactgtattccatacacatagcagctataccttcagcttcaacattaacaatcctttgaagccaagacattgtatctctaggagcgacctcctgatttgctattaaactagaccataaccaattcttcttgtgtgacatgagttatttggtgacaatagaacctggctgggggggaatggttatgagagtgatgagttctgatgtgaggcaaatccagagttccttgtagatacagaatattagtgctagggggacacagcacaacttgggaacttctggggaccaggagggtactcacactgtgatggggaagaagaagagaatgttattttctattacgttcacactgctttacgatgagtcaaggggaaacgcgttgggaaagggatatgggtaaggttggagaatatggagaagtaattttactttttgaacagtttctccctcatgtgctgtgtgagattcatatcctcaataggagcctcatctgtttttacttcccatattaaatacaaacagtgcattaccctcttctcttacttttgtcacctgttcctgtaggatatgtggtgtctagagttcttagggagtcctttggctctcccaatattgctatttcctgtacaagaatttcaagcttctaccagaatccataagaagccccatccaggtgtaatggatagaaggaagatctgaaaacatgaatctgctgccatctttgtgaccttcccttctccctgcgtaccctgtagtttttcatcctgatgcaatccaatccagggacattcagtggcaatggcttctagagtggaaggcctggcgggagcatggaacgtgtgtatttggagtggagttggctattgtaatacttagtgaatggaatttcattaggtccttatctgtgtgcactgaggaaaagaggtccttttacacagtgcttgtaatggagtggaaaattgcatttccctcttgcccgaacagtgccattagtggggaggcagactgtctgctgagtgcaggaagccacctcgggcagtgcagggctgacagcccaaatgatggcagtgccgagagacccggaagatattaaaataaaaacagcttgtggtgttctttttgtcctgtagcagttcttccctgcaatgcagggagtgattggatttgaagcactgagaaaaacatgttaagtaagaaattgtttaaataaagttgtttgaggttgaaactctcccccaggcatggagggaaatgtagttagctgcgtgcaacttacagatatccaagaggcaccatggtttttttgagtcaggcaagtatgcagtacacttaaaaaatgaaatggacaatgagatctcttctttggtcatccaggtgggttccagccccacctgggaggtgtgtaggccctctgatggcctgttggtggatcaaatcaccatttttactttccttggttctcagaattgcaggtgagaatagctgtgagtctcactgcaaaaaacagcaagagaattactcagctctggggaaattgttgtttctaacctgatagggttcctttcttgtgggttggtgttagacacagtcccatggggagcagccagtgtgatagcagaggaggtgcacagcctgtccttgccgaggaaacagaatctatgcagctcctgggcccaaatacatccaaatacaaagtggtgcagactaggaatgttgggaggaactatgagtgcaagagcctttcatgattgcccaaaggcactgggagaatgcaattaaagattttgtcaccaccaggcctgccctaaaagaactcctgaaggaagcactaaacatggaaaggaacaaccggtaccagccacggcaaaatcatgccaaattgtaaagaccatcgaggctaggaagaaactgcatcaactaacgagcaaaataaccagctaacatcataatgacaggataaaattcacacataacaatattaactttaaatgtaaatggactaaatgctccaattaaaagacacagactggcaaattggataaaaattcgagacccatcagtgtgctgtattcaggaaacccatctcacgtgcagagacacacataggctcaaaataaaaggatggaggaagatctaccaagcaaatggaaaacaaaaaaaaggcaggggttgcaatcctagtctctgataaaacagactttaaaccaacaaagatcaaaagaggcaaagaaggccattacataatggtaaagggatcaattcaacaagaagagctaactatcctaaatatatatgcacctaatacaggagcacccagattcatatagcaagtcctgagtgacctacaaagagacttagactcccacacgttaataatgggagactttaacaccccactgtcaacattagacagatcaacgagacagaaagttaacaaggatacccaggaattgaactcagctctgcaccaagtggacctaatagacatctacagaactctccaccccaaatcaacagagtatacattttttttcagcaccacaccacacctattccaaaattgaccacatagttggaagtaaagcactcctcagcaaatgtaaaagatcagaaattatagcaaactgtctctcagaccacagtgcaatcaaactagaactcaggattcagaaactcactcaaaactgctcaactacatggaaactgaacaacctgctcctgaataactactgggtacttaacgaaatgaaggcagaaataaagatgttctttgaaaccaatgagaacaaagacacaacataccagaatctctgggaaacattcaaagcagtgtgtacagggaaatttatagcactaaatgcccacaagagaaagcaggaaagatccaaaattgacaccctaacatcacaattaaaagaactagaaaagcaagagcaaacacattcaaaagctagcagaaggcaagaaataactaagatcagagcagaactgaaggaaatagagacacaaaaataccttcaaaaaattaatgaatccaggagctggttttttttgaaaggatcaacaaaattgatagaccactagcaagactaataaagaagaaaagagagaagaatcaaatagacgcaataaaaaatgataaaggggatatcaccaccgatcccacagaaatacaaactacgatcagagaatactacaaacacctctatgcaaataaactacaaaaatctagaagaaatgggtaaattccttgacacatacaccctcccaagactaaaccagaaagaagttgaatctctgaatagaccaataacaggctctgaaattgtggcaataatcaataacttaccaaccaaaaagagtccaggaccagatggattcatagccgaattctaccagaggtacaaggaggaactggtaccattccttctgaaactattccaatcaatagaaaaagagggaatcctccctaactcattttatgaggccagcatcatcctgataccaaagccgagcagagacacaaccaaaaaagagaactttagaccaatatccttgatgaacattgatgcaaaaatcctcaataaaatactggcaaaccgaatccagcagcacatcaagaagcttatccaccatgatcaagtgggcttcatccctgggatgcaaggctggttcaatatatgcaaatcaataaatgtaatccagcatataaaaagaaccaaagacaaaaaccacatgattatctcaatagatgcagaaaaggcgtttgacaaaattcaacaacccttcatgctaaaaactctcaataaattaggtattgatgggacgtatctcaaaataataagagctatctatgacaaacccacagccaatatcatactgaatgggcaaaaactggaagcattccctttgaaaactggcacaagacagggatgccctctctcaccactcctattcaacatagtgttggaagttctggccagggccattaggcaggagaaggaaataaagggtattcaattaggaaaagaggaagtcaaattgtccctgattgcagatgacatgattgtacatctagaaaaccccattgtctcagcccaaaatctacttaagctgataagcaacttcagcaaagtctcaggatacaaaaccaatgtacaaaaatcacaagcattcttatacaccaataacagacagagagctaaatcgtgagtgaactcccattcacaattgtttcaaagagaataaaatacctaggaatccagcttacaagggatgtgaaggacctcttcaaggagaactacaaaccactgctcaattaaataaaagaggatacaaacaaatggaagagcattccatgctcatgggtaggaagaatcaatatcatgaaaatggccatactgcccaaggtaatttatagattcaatgccatccccatcaagctaccaatgactttcttcacagaattggaaaaaactactttaaagctcatatggaaccaaaaaagagcccacatcgccaagtcaatcctaagccaaaagaacaaagctggaggcatcacactacctgacttcaaactatactacaaggctacagtaaccaaaacagcatggtactggtaccaaaacagagatatagatcagtggaacagaacagagccctcagaaataacgccacgtatctacaactatctgatctttgacaaacctgagaaaaacaaacaatggagaaaggattccctatttaataaatggtgctgggaaaactggctagccatatgtagaaagctgaaactggatcccttccttacaccttatacaaaaattaattcaagatggattaaagacttaaacattagacctaaaaccataaaaaccctagaagaaaacctaggcattaccattcaggacataggcatgggcaaggacttcatgtctaaaacaccaaaagcagtggcaacaaaagccacaattgacaaatgggatctaattaaactaaagagcttctgcacagcaaaagaaactaccatcagagtgaacaggcaacctacaaaatgggagaaaatttttgcaacctactcatctgacaaagggctaatatccagagtctacaatgaactccaacaaatttacaagaaaaaaacaaacaaccccatcaaaaagtgggtgaaggacatgaacagacacttctcaaaagaagacagttatgcagccaaaaaaacacatgaaaaaatgctcaccatcactggccatcagagaaatgcaaatcaaagccacagtgagatatcatctcacaccagttaggatggcaatcattaaaaagtcaggaaacaggtgctagagaggatgtggagaaataggaacacttttacactgttggtgggactgtaaactagttcaacccttgtggaagtcagtgtggcgattccttggatctagaactagaaataccatttgacccagccatcccattactgggtatatacccaaaggactatatatcatgctgctataaagacacatgcacatgtatgtttattgcggcactattcacaatagcaaagacttggaaccaacccaaatgtccaacaatgatagactggattaagaaaatgtggcacatatacaccatggaatactatgcagccataaaaaatgatgagttcatgtcctttgtagggacatagatgaaattggaaatcatcattctcagtaaactattgcaagaacaaaaaaccaaacaccgcatattctcactcataggtgggaattgaacaacgagaacacatggacacaggaaggggaacatcacactgtggggactgttgtggggtggggggagtggggagggatagctttaggagatatacctaatgctaaatgacgagttaatgggtgcagcacaccagcatggcacatgtatacatatgtagctaacctgcacattgtgcacatgtaccctaaaacttaaagtataataataataataataaaaaagagtctccttaaatactgaatagagaaaccattaggaaatttcatattcaagctacagaagaattacctggtccagccatttcttgtagagatgaggaatttctttctctgaaggtgcaagtatcaaagcagactcccttgaggctcctacctctctctaatggatgtgtctataatgttatagactgaatcatgtgttcccccaaaattcatatgctgaaatcttaaactgcaatgtgatggtaataggaagaggggtcctcaggaagtgattaagtcatgagggtggagccctcataaatgggattaatgcccttacctgtgggctcccagagagctttcctgctctcttttggccctgtgaggatgcaatgagaagtaggcagtgcagctccagagagggctcccaccagaaccaaccatgctgacacctgatttgtgactttagcctccagaactgtgagaaaattcctattgtttcagccacccagtctgtggtcctttgttatatcacctcatttgactgtgacagcatctcttcgtggtcttttctctgttttcttgtccactctttcctccagctactcttctttcacttcctctttgggagaattgtctttctacttggtctatcccttggcctcagccttctgttcttgcctgccggatatggaaggttgactgggatcagctacctgccaaccattctgttctctagtttccccaggtattccttatgtctacataagttagggttgggaagttgtggctgtgcctcagtagggcccctcagcatcacagtggttgctaagccctgtcctaggacattataattttctaaaaatttatatgactctcaaattctatatgaacacatatatcattatgttaaaattattaatatatttaaattagtaatgagggaaccagtgatgtggtaaagctggttctaagagcacttgaggaactgggtatgtataagcactgaaaaaaaaaaaagaatgggggccaggcatgatggctcagcctataatcccagcacttttggagaccaaggcaggcagattgcttgagcccaggagttcgagaccagcctggaggaaatggagaaatcccatctctacaaaaaatacaaaagttagccaggcatggtagcatgcacctgtggtcccacctactcaggaggctatagtaggaggatcacttgagcctgggaagttgaggctgcagtgagccaaggtcatgccactacactccagcctgggcaacagagccagaccctgtctcaaaaaagaaaaaaaaaatgttaggcaaggattgctaggttagattcaaagctggtcagtattctacagagcaataaaataataatgtctaggactctttttttttttttttttttttttaccggacaaaaatctacaatttaacatgtaacttcattgtatctaggttgtgatcaagtaatgagcagtgaagtcaaatataggtatgatctaggaagaattaactaacccttgggaagacctgttcacaaagataaaatatgccattgaagggatattgtgtccttccttgtccccctacccctttacatccaagttttggatgctttttcttaacaatataaacccagcatttgagtctatatttctttgtaaatgtaccagatatggtatatctggttctgttatgactccatcttgaagtaaagtcccagctagtatgtcaggtatccactaattaattaaacgtttaacacatttattgagttgtctctgtgtgctatggtttggaaatatttgacgccgccaaatctcatgctgaaatttgatccccaggccgggcacagtggatggctcacacctgtaataccagcactttgggaggctgagctgggtagaccacctgaggtcaggagttcgagaccagcctggccaacatggtgaaaccccaactcaactaaaaatataaaaactagctgggcgtggtggtgggcgcctgtaatcccagctactcaggaggcagaggcaggagaattgcttgaacccaggagacggaggtttcagtgagctgacgatgacacgatgccaccgcactccagcctcagtgacagagtgagactccgtctcaaaaaaaaaaagaaaagatatttgatccccagtgttggaggtggggcctaatgggaccactttttgggtgatggggatggatgcttcataaatggattggtaatgaatgaggtattgctctattataagttcctgtaacagctggttgttaaaaagagcctggaacttcctcacttctctctcttttcttctctctccatgtgatctgtacatacattggctcctgtattagtccatgttcacactgctgtaaagaaatatctgagactgggtaatttattttatttatttatttatttatttattattatatatatatttttattatattttaagttctagcatacatgtgcacaacatgcaggtttgctacatatgtatacatgtgccatgttggtgtgctgcacccattaactggtcatttacattaggtatatctcctaatgctatccctcccccctccccccaccccacaacagcccccggtgtgtgatgttccccttcctgtgtccaaatgttcctattgttcaattcccgcctacgaatgagaacatgtggtgtttggttttttgtccttgcgatactttgctgagaatgatggtttccagcttcatccatgtccctacaaaggacatgaactcatcattttttatggctgcatagtattccatggtgtatatgtgccacattttcttaatccagagactggataatttataaaggaaagagatttaattgactcacagttccagaaggctggggagacctcaggaaacttacagtcatagtggaagggaaagcaaacacattcttcacaaggcagcaggagagagaagtgtgagtgaaggaggaacttgcctaacacctataaaaccatcagatcaggccgggcgtggtggcttatacctgtaatcccagcactttgggaggctgaagcgggtggatcacctgaggtcgggagttcaagaccagcctggccaacacagtgaaactccgtctctactaataatacaaaaattagccgggcatggtggcacgtgcctgcaatcccagctacttgggaggctgaggcaggagaattgcttgaactcaggaggcagaggttgcagtgacccgagatcacgccattgcactccagccttggcgacaagagcaaaactccatctgcaaaaaagaaaagaaaacaaaacaaaacaaaaatcagatcttgtgataaatcactatcacaagaacagcatggtgaaaaccgcccccataatccagtcacttccctccctcaacatgtggggattacagtttaagatgagatttgggtggtgacacagagccaaaccatatcaggtccccttcaccttcctccatgagtggaatcagcctgaagccctcaccagattcagatgttgtgacatgcatcttgtacagcatgcagagctgtgagacaaataaatctcttttctttataaattacccagcctcaggtactcccttatagcaacacaaattcactaagacattgtgtcagattttaacgtatactgatgaataaaacaagcaatgttgtgaggttcatgataagagaaatacatggcatatactttagaaaaaaatattatggaaagcctgtcaaagtgcctctacctgttatctgaatcacatgatggagtgaattccccatgcctgtttgcctgaattagttcagataagcaggagttggttatgttctatcaaattctgtgaggtatgaatggaaaaaaggaatttagaatggtttttcatgttggtgtgaccttgtttactgtgttcctccttggattcaaagtctacccaataagtaatatcagtaaatatatcggtaaagtatattgaagcactagctgtggacttttttttgtttatttattttaagatttttgataatcatcctaaatctattcttatgcaagagtcttaaagtagaaagtttctctgttttttcttccttcctaaactccttcaatgtgattgacaactggctccatgaacgtggggcattgtacctaccaactgtaatttttccatcagtggaaatcttgcaagtctttgacagacagagtagaatgcagaggttgtggatagtagtgaatttcccaaggccctgatagttttagggtgatttttgtttctcaagattcttttagccaaattgtaaagccattcttgtaatcaactgaatttcccctttgatattatccccaaggaagagtaactacattagtgttaagaccagagaatcacagggcatatcctatagtctctcatagtatgtcctattactggctctctgagaaagggagacaggttggttttaatatcgcatcagtatgtacagtattttttattaaatactggccaagtataagtcacttttaggccataagagggatatagaggtataagaagagaaactcacagagtagttgaggagatgagatacccacagaccacatagatacttatataagaaaatgtgtgcagaattttgactcagcattccaggctacagtgctcacagagttcaaccagtggggactgtggagggcatggaaggttcttaatggaaattgttagtcttttttttttttttttagacagagtctcgctctgttgctaggctggaatgcagtggtgtgatctttgctcactgcaacgtccgcctcccgggttcaagtgattctcctgcctcagcctcccgagtagctgggactataggcacacgccaccacgcccagctaatttttatatttttagtagagacggggtttcaccatgttggccaggatggtctccatctcttgaccttgtgatctgcccacctcagcctcccaaagtgctaggtatgagctaccacgcccggcaggaaattgttggtcatttaatctattttaaccacccaaggggttccttggtgccctctgcataaacaaagaccatggcattgtaatagacggagtttaatagacaccaggccaggcatgccatgtgggagatgaagttcatactcaaatcatcttgtccagaattcataggattggcgtttttcagacagtttggggtaaaggggtaaaggtgatcaggtaacagacacttgccgctgattggttggggcaaagatgaaatcatagggggttgaatcggtcctcctatgcactgaatcaattcagggtggggccacaggagtggggttggcgagtccaggtggagccatgggtgtcagacatgcaaaaaacctggaaagatatctcaaaaggccaacctacaatagttgtgttatttgcaggagtaattggggacattgcacatcttataacctccagaataatggctgacaatcatttatgcctgcaccttagcaggactcaggttctcctctgcatagcctgataggctcccactagctttacaaaaagcacttgagttttgggcaaggcctattatttaaactatagcttaaatgttttccaaagttagcttggcctaataactcaggaataactaagggaaaggcaagatgtggggaaggttagcttagcttactgttataatttttctcactgatacagtttttgcaaacatggtttctctatgaaggataaatgcaatctggattatagtagaagcaggagatgttgaaattctaaggagaatggagctgggacaatggaatgcgaaggtttggacaataatataccaagtatgtctttgttgggcgagaacgtctgttgaggtttggtatttgagtctgagaattgaaatgacaatagaccaatcaacaggagaaaaggtacataaatttactacaggcatggggcatcacaagagacagagtgcccaataaccccgtgagattcgaagcttatatgcccttctccatgggagagagtagtgggggtctgcaggcacttttagaggaaaaagtaaatgatgtttaggagagaagaatgggcatcaagaacagatgatgtcctgggacgaagtctgtctgggctctgagtgtgctgtgtactctagtcttcatttctgcaagttaatcttccctgtttgatgagattatagagaggtgatgcaagacaattgcattccttctagaggaacttcccttagtcagatgagggaacttcagaaaaagccgccctctgtgcttggcaagaggtagaggggtgagagagggtgggcagaagaaggtcagactctggttctgagactgcttctttagttcaaaatactcagcatatcaacacccccacactttgaggtatctcttccgagcccgtgtctttgcgggtgggaggttggggaggatccagtctgggcttgggagttggtggcatccttttttatagctgctccaggagcacccaacctgggtgtgtttactgaagttgtacgcatgctcctttgagccattttcgacttcaccattttgccccttagttcactttcttaagcccattcacccaactcctgagatcttttcaggaagctgctgataaccagtttcaggtatttctatctattggtaggctgcctttccctggagccccctgggaccaattattattttagcgaggcagtgtaataactgcctgaccatcacctgatggttgcctgacattcctggtggggtaggggtgggtctctcctgccctgctgatgtctgactgcctacctactgtaacaccctaactaaaagttgagttaactctgaaatcaagcaacaccaagcagaaagcagagagggaaacttgtccctttcaaaacagattaaatgtttcttattaattcagttgcttccacacatattcaagtttgtatccagaattaagcgagtcagtagttttaaatcaaattacaaatacagcatccttcatatctgaaataattgtgtatctgtatgtaaatgctgggagaatatacttttttggatattattctgactgtagtttcaaaaaaaagtagatagaaatctggaaaaatgagtaaacactattaattagatgagatatttatccttggcttaaattagaaaacttactaagagaaactatgaaaatatcaattaaaacaactagcatgattttatttttcactgttaagagggcaaaaaaaaaaaaaaccccaaaaatcccatgcatgaataaaataaatatatatttggggatgacaccatcttggcatttccaggcattcttttctaaacatattctttatctgagctgtcttgcaatacttttaatataattaaaagcacataatgagtgccagacttgtcaatttcaacaacaaagtgctgaaatttgcagtgaaactgagagatccatctcccatacattgtaatgaataggttcataaaaggaaaatagtttaattacattttagttcatggattgttaataggctggagtatctaaattgaataatgtgattctggtaataattatgtgtaaatgaacttgtttaaatgatattttacagcttctttataaaattacagctagaggcaatccagtgatagacagacaaaggccatgcaaaaattatcataaactattagcttgtttgcaaagggttttatgttaatcttttagtacttaaagcaatctgcaattaacatatcatggggagctgcctccgagcaaaggcatgcaaattgaagtgcttagataaaaagccattcatgttgtgggggaaagagaaagaaagaaaaaagaaaaagaaaaaaaaatcaaagaaagggtggcaaagtactcagagggtgctggtttttatatttgagattaaggaggtgtaatgattgtgttatctaactatggctgtaattaaagcttttctccagcagacatgacaatagatactgcattgatttcggtgttttaattgtgaaagtcattttatttcagggcagaagatatgaatagcctgaatcaaagggctagaagattgctttgttgatagtacttgttcaacagctgcctggctgcttaatacacaagtgtggagaatgcagagagacccaaggaggtgctgggtattgtgattctcctgctggtttcctttccttttatgaaaaaggcaaggatcttggtgctgactgtaaacaaacagccttttcatacctcatcgatgtttttcctccccaactttgcagaacaaaagaagtcataaagggccttgaactaactttactactgctccttttaagctacagaagtttatgcaaagtaataaaaaccatctttgctagtggagatatcacccctctaatgatgaaaaaaagtctctgagtgactgtggtagttattatcacaaatagccttgtgacagaaacagtttgtaggagagaggttggattatttacattaagggcatatccacaaaatctcacacacagttagtttgagattagtgctttcttatcagtttctatatacaaaccacaggagggaaattaagtgaggggaaaacatatacaatcccagagcaaagagaattctaaagagaattttagggagatcagggtagacttaaaataaaaatcacattcttggctatttcttctataacacttcagtgtaaatggaggtgaaacccagtgatttccagtaattcctattctattgatttatctcttctttgttcctagaaatatcaaatagcatgtttaaaggagtctgaataataataaacttggttttagggaacactgtttctttaagtgatatgatttaaaataaccagacaccaagatattacaaacataacaataataacataatcatttactgagtgttgtgctatttttatttatatttctgatgatataagggagtgaaaattttccctctgccctctgagagtttgataattgaatctatggaataaatggacattagaccaattaataggagaaaggacacataaatttattacatgcataggagcatcatataaaacaaaggtgaacacccagtgagatctagaagtttttataccctcttcataggggagaagagagggggaatgcagacaacttagggaaggtacaagcataccttggagatattgaaatctcaattctagactgatgcaggattttcttcttggtcaccgtgcaagctggagacctctggccagcgatgccctaccctggccttgctcgaccacactagctgctgcaggagatggcctctacctgctgtaggagacggcctaagtctggcttacacactggttcccgagttcttgtcttgcacccaagaaaaataaggatgtactgacaatggaagagtgagccagatggggagttttattggtgatgaaacagctttcagtggagaggggacacaggggtggtccccctacccaaaggtgggaaagtcccctgtgtgtctgggcctggggccttttatggactcagaatggggagtgtgtgctgattggtttgggggtatgcaaaaaagtttaaaccaaagacaccactcaaaggtgggcatgacagtgaagaaaaccaattacgaaagggtaggtatatgtaaaataggtgaaaggtggggacagtcagagaaaagtgcgccaaatgggaagacaagttctcagtctggtccaagaatttaacttgtagcttggctttcaggcttcaaactgtaatcagcttggaggtgggatttcaccggggacccccactgtctgcctaggcatttggctgcctcctttcactatcaagactgccccaataaaacaaaaattgcaataaagcaagtaacatgaatgtttggttttcccagtgtgtataaaagctatacaatactgtagtctgtgaggtgtatgataacattatgtctaaataaacaatatacataccttaattttaaaatactttattgttaaaaatgctaataactatctgcattttcagttagttaccatctttttgctggtgaagggtattgtttcagagttgctggctgctgactgatcagggaggttgttgctgaaggttgggatggctgtgacaatttcttaaaagaagacaacaatgaggtttgccacattgattgactcacgaaagatttctctgtagcatgtgatgctgtgtgatagcattttactcacattagaacttcttttaaaattagagtaaatcctctcaaaccctgcctatgctttatcatctaagtttagtaatattctaaatcctttgtggtcatttcaagaatgttcacagcatcttcaccaggagtagattccatctcaaaacaaacaaacaaacaaacaaaaaacactttctttgctcatctataaggagcaactcctcatctttaaaagctttatcatgaagttgcagcaattcagtcctatcttcaggcttctcttctaattctggttctcttgctatttctaccacatctgctgttatttcctctactgaagtcttgagcccctcaaaatcatccgtgagggttggaattcacttctttcaaactcctgttaatgttgatactttgacctcctcccatgaatcacaaatgttcttagtaacatctagaatggtgaatcctttccagaagattttcaatttctattgcccagatccatcagaggaatcactatctatggcagcgatagccttactaaatatatttcttaaataagaggacttgaaacttgaaattactccttgatacatgggctacagaatggctgttgtgtgaggaggcattaaaacagcattgatctccttgtatatcttcatcagagctcttgggtgaccaggtatattgtcaatgagcagtaatattttgaaagaaatcttttttttctgagcagtaggtctcaatagtgggcttaaattaatatttaagtaaatcatgctgtgaacggatgtgctgtcatccaggctttgttgtttcattgatagcacacaggcagagtagatttagcgtaattcttaagggccctagaatttttggaatgataaatgaacattggcttcaacttaaagtcgccagatacattagctcttatcaagagagtcagcctgtcctttgaagctttgaagccaggcattgacttctctctagctataaaagccccaaatggcatcttcttcccatgtaaggctgttttgtctacattggaaatctgttgtttagtgtagtcaccttcatcaaatcttagctggatctcctggataatttgctgcaatttttccatcagcacttgttgcttcaccttgcccttttatgaagacagcgtctttccttaaaccttatgaaccaacctctcttagcttcaaacttttcttctgtagcttctttacctctcagcctttacataaatgaggagagttaaggccttgctctggattaggctttggcttaaggaaatgtcatggttggtttgatcttctatccataccgctaaaactttctccatatcagcaataaggctgtttcactttcttatcattcatgtgctcactggagtagcacttttaatctccttcaagaacttttcctttgcattcactgtttggctaatcgtttggtataagaggcctagctttcagcctatcttggcttttgaaatgccttcctcactaagcttaatcatttctagcttttgatttaagtgtgcctctttctttcacctgaacacttagaagccattgtagagttataaattggcctaatttcaatatcgttgtgtctcagggaatagggaagcctggggagagagagagagatggggaaacagtcagttggtggagcagtcagaacacacacaacacttattaagcttgccatcttctatgagcatgattcatggtaccccaaaacaattaggataatgaaatcaaagatcactgatcacagatcaccataacagatataataataatgaaaaagtttgaaatgttacccaaattaccaaaatgtaacccagagacgtaagataagcacatgctgtgggaaaaatggtgttggtagacttactagatgcagggttgccacaaatccttcagtttgtagaaaaaatagtatctgtgaagtgcagtggaatgaggtatacctgcagaggatttctgggaaagatgaatgggccctcagaataggtgacagcctgcgacagggtctttctgggtgtggtgtcacctctattctcctctcttgtgatatagataattgtccctggctgataagattctacgggagggaattcatgactattgagttacaggagtagaagcttggaatttctgggggctggcagggacatgagttttgggaagatggggttagaaactgtatgacgaataagggttgtcttcttatacagattaaaagactctcaggtcataacagttttctgcagctagcagactttttctgatccagatagtttactaatgtagatttcctttacagatgtaagtttcttttacaaaaggacaagttttcagagctacttccgtgtgtgcagttcctcagagtaaccagctcgaaatatgccaaagaaatatagtttggggtggtacattctgtttggcgagcccaaaaaatgacctccaataaccatcccaaagaagtcgatgggatgatccattttctaaaacgagtgaacttagcctcaggccaaatatattgttcaaggtcacatagcaagggaggggcagaggcaggttagaacccagacagtctagctagatctctaggaaagcctgatgccatcctcacagggttaacaagaattctggacagaaatgtagttataattaagcattaattaagcaggctgcactttgacccagttccttgtaactgaaagtcaggtaacaccagatcctgactatttgcatccccattgttcctatagacaggatttctggagttacatcaggcttttaagatagataggatctctgacactacaatcataaggtttatgtttgagaattgcagatgcagattctgaattccagtggaacagctaatgctaaccattttgaagaccccaacagaggaactgaatcagcatgagaatggtttcttcatctccctgtcccatgacttactctgcactctttaaccaatcaatggtctccacactttggcccgctcccagacctttaaaaaccctagccccaaactccttggggagatggatttgaggtttccttctgtctcctcgtttagtggcctatgaccaaacttctttttctgctgcaacccagcatcttggtgtattgacttgccatgaacatcaggcagcaaacctattatggtcacaagcccttagacttcttctctgattaatgttttctaagtgcacaaaataaagtacaaagggttacaaagcaaatgtagtatattgaaatactgttatcaaaatatttaaaaataaaatttatgacttagtaatttatgtgcttacagccagcagcaactataatttcaaagctatgctaacatctactataatttcaaagtgttgataagcataaacagtgttttggatttctgcaataatgtgacatgaaaatacctgattttttatcaatgataaagtcacagatactccttaaactccagtcattttgttgcctacatttataataaaagaaaatggggctgaggccagaggattgcttgagtcttggagttggagattgcagtgagctatgactgcactactgcattcgagcctgggcaacagagggagaccctgtctcttaaaaaatagcaaaaacagaaagaaagaaaatgttaagttccccataaacattactgaaaataaaactatatttttatatatgtcagatattatacaaaaatacatgtgtagataattatacataaaaataatttttcccaccaaaattcacagacctctaaattctataggtgtacaaggcttaggttaagaacatttttggttttacagatgaggaactgaggcccagagaagggaatttagtgacccaaggttatcagtaatcagtgataagatgtagattagagctgattacactaagagaacataaggaaaacttaaaatactgtatgttgatcttttccctttctcctgtgactttggtggcttttgctgacatgctcttggaatgttgaacctttctttgtctttgcaatgttgtctttttcaaagtgggagcagcaagcaatttccccagccctgagatcagttgttggcaattcctgctttcagtggcagggctgggaggatcccagaaagcgcagccatagggactccagggaagcttcctgtgattgcaacctaaatttgaaaactttctatttaaagggacaagagtgcttttttttttttttttttttttttaagatggagtcttgctctgttgcccaggctggagtgcaatgatgtgatcttggctcactgcaacctctgcccctgggttcaagcaattctgctgcctcagcctcctaagtagctgggattacaagcacgtgccaccacgcctggctaatttttgtgtttttagtagagatggggttttgccatattggccaggctggtcttgaactcctgacctcaggtgatccaccctccttggcctcccaaactgctgggattataggcatgagccacggcacctggctaagagtgcatattcattatgtgtctcctctacgcgaggtctttgtatatcctcttccagttaatattcagagaggcctaataaatagtccccatccttgttctagaggggaagagagaaactcagagattgccatggcacatggtgcttgtggtgagccggggttgagttagactttagctatgtcctcacagcctaatgacgcaggcaatttggtcctctatttacttattaggaaactgaggataaaagacttttagcaagatggccaagttcatgacttattaagtgacagagccacgaatttaactgaagtctgttgcctgtaatactcatctttgttccccagactctgttgcccttacattgaaggaataaggacccccccgccctcccatcttctctacccaggggtcttctcctcaggtgtctattgcatatctgttatttacagggcatgtcccatgtgggcatgcaggaggggaagggcagcaggtagaaacacataaggatatacttgattttgagctgactttcctaacgtccctaattggataaataaagctaacacaaagggaacacacagataatgttcgatgacaaacacggacaacatcaacaatgtaataataataattgtgatgatgatgataatagctaacatttattgaatgcatactattttaaggattttccaaaagttgtttctttttttttttaatttgatcacatatcccataaagaagagtgtgtgatggcgacggcacccttacacacttggcaggaaggacatggctgagggtgccacagtcataaacacagaaacacagagatatatgttctccttattgattttgtaataatattggtggcaatcttagctatgaattgagtgaacaggtattatgggaaaggaagggggtgagatggatcaaccaggccaactcccagggggccatgttggcaaattttcctgcctcatgccttgccttggtgacgtacaaattttaggcattttaaagaaataccccaaactgtcagccctgtgcagagggagcatggttcactccctagatagtcaatttgggtgatagggggtggccagctgcttgcttgggtctcaggggagaggccctgatctttctggtccttctcccccaatcctaacctcagcccagacatcaggtcatttctacacactgcattaggcttctctaaccaataaggaacatttacccttaaacatggtcaccatgtcattatcacaactaaaaaaagaataataattccatagggcttttcaatacccagtccatattctaattttcccagttgtctcaaaaatatctttttgtatccagttcgtttgattcagtgtccaaacacagcccataccttttattgcgttgctgtatccctttgatcttttttagtctttaatcatctccctccccttctcctttttcatcttctctttgtctcttatgctctctgtttctctctctgtctctctctctctattatgcattgatatttttgaggaattgaatgagttatcctgggcaatgacccacattctgctttggctggttgcctccttgccatgccatctaacttgttcctctatcctctgtactttctataatctggtgtcagatcaataacttgtttgaattcaaattcatttttttttgtatatggtgctgtatacttcctattgcattacctcctgagatgcataattaatatctgatcatggtaactctgtgaggtgatgggtgtgttaattaatttgattgtgctaatcattacattttatgtatatatacttatatataatgtatatatacatacacaagcatatgtcgaattattacattgtacaccttaaacactatatacagttttattggttaattatatctcaatatagccgggaaatttttaaaaataaaaacaaaaacaatcccatcaaaaagtggactaaggacatgtatagacaattctcaaaaaagatatacaaatggccaacatatgaaaaaaatgctcaacatcactaattatcaaggaaatgcaaatcaaaatcgcatacacacacacacaccacacacacacacacaccacacacacacatacgcacaccatagaatactacttaactataaaaaggaatgaaataatggcatttgcagcaacctggatggaattggagaccattattctaagtgaagtaactcaggaatggaaaaccaaacatcatatgttctcattcaccaccttactcccgcaagaagggccataataataaatatatgtaatatatatatttgtgtatatatatgttatatataatatatacatgttatatattatatatatgttatatttatatatgttggcatggatgtggtgaaaagggaacacttttacattgttggtgataatgtaaactagtacaaccactatggaaaactgtggagattccttaaagaactaaaagtagatctaccatttgatccagcaatcccactcctgggtatctacccagaggaaaataactcattatatgaaaatgatacttgaacatgcatgtttatggcagcataacttgcaattgcataatatggaaccagcccaaatgcccattaatcaatgagtggataaagaaaatgtgagatagatagatagatagatagatagatagatagatagatacacatatatatgtatatatatacacatacatatatatgtgtgtatatatatatatacatatatatatacgcacacacacacatacacacatacatacacacacaccccatggaatactacttagccataaaaaggaatgaaataatggcatttgcagcaacctggatggaactggagaccattattctaaatgaagtaactcaggaatggaaaaccaaacatcatatgttatcactcataaatgggagctaagttatgagaatgcaaaggtataagaatgatataatggactttggggtcttgggggaaaggtgggtgggtggtgagggataaaagactacaaattaggtacagtgtacactttgcaggtgatgggtgcaccaaaatctcagaaatcactactaaagaccttattcatgtaaccaaacaccacctgttcccccaaatcctattgaaataaaaaattaaaaataaaactgtatcttatcagtaggttcagatggttcttccactgaaagaatcagctggagtcttccattgtaaggttcccaaccaaccttttacctaatgtttgagcatcttttgatgatggtgacctaagtccattatttcattacaggtgggagaataattttctaattttatcatccctttgtatttattacctggaattctgccatgaaggattttcttccatatagtaattgcttgaaatcttttttttctcacagcagataacttggtttgaaacatagtttctgtgggcattgactgtatgaaatgggaatatgaagtgtttccagatgcagcggaagtgggaggctgagggtcccctgcaggcacaggattcccttcatcctctgtacctgtagcagaggagcccttgggctccagcagtacaattggggaatgccctggtgaataacactgcctgacccccatcctcaccaggcttacaatgtggggtcctggagactgaagggtatgcctgtagtacagagagggtagccactcaccagcttcatgactttggggctgttggccacagtcaacattgcttccttatctgtaaagtgagaataagagtactaacctcacaggatggttgtgaagattcattatgctaatgcctataaaatacttggcatagttttggctgtataacagtgcttaataaatgctggcttgattattcttattgtaataatttttttttaagagacagagtattgttatgttgcccaggctgtagtgcagtggctattcacaggtgagatcccactgctgatcagcacaggagttttgacctgctccatttctgacctgggctggatcactcctccttagtcaacctggtggttccctgctcctgggaggtcaccatattgatgctgaacttagtgtggacacccaatcagcatagctcactacagcccagaactcctggactcaagtgatcttctcacctcagcctcctgagtcaccaggactactgactattgcattggtttgttaggattgccataacaaagtatcacaacgtgggtggcttaagaacaacagaaatttattctctcatagttctggaagccagaaatgggaaataaaggtgccagtgggcccaggctcctccaaagactctgggtagaatcctctcttgcctcttccccacttctggtggtagctggcaatccctggtgtgctatcacttatagatgcatcgtgccaatatctgcttttgtcaccacatgcccatcttttccttctgtctcttcacatggtgttctcctctctacatgttcacattgtcctcttagaaagataccagccatattgagttaagggccaaccctactccagcatgacctcatcttaactcattacatctgcaatgtctttatttccaaataagctgacattctgaggtactggggtttaggactcaacatatctttctgggggatacaactcaacccataacaattgtgtaaccatacaacaccgagttgtcctacatcttgacatatagaagggttccttgtactttattgttatgccacatttcttgcattttactgttttcctactggttttctctcagatatgagatgctatgtagtgcagagtgaggataagatgagcagctcttccacgtttagacccagagcagacacttgaataagtcgttctccacctccaaagacaggataggagcaggaaacatcagccagaacatctcgtataaacagcagaagcagtacagccttagagaacccatccacacctcagaacttcccagccaagctcatgctggcaggcacccagtgattctcccgtccgtatcacgacaagcctcggagtgaactgtttatttatcaattcttaattgagttgatgtttactcatgattgccagtggatgagtaatttactacagagttcgaggagtcagatagtgaagagatcattataaagagaaattataatagagttccctgtactcatgggtctggtaataaaagattgatataattagatggggcttggtaacaaatactattacattatgtctgaatcttatttaaatatattggccttttatcttaaacttattagtgggtggctgtagcttacgtcgacaccagctagctattttactcttgcaaaaggagggctgagctatacaaaggagtcaatcatttgatgtttagaagcaatggcacggtatttaaggcagttctccctgttgatttttagaggaagagcaaggtataaggggaacttaagcttccacttggtcacaaactttctggataacaaattcaggggctgtgtttctctgtactgtggctgtggctaccttggaacctttaacttggccaaagtcatccttgagaaagcagataaaggaaagggcaggaaataatctgacaacgtagtgagaaaatgagctgtggagtaagacaggcctgagatgaaaactttgccatagtgggttgagtggtagcccccccaaaatatatcgctccatcctatccctgggacctgtgaatgtgaccttcagtggaaaatgagttgttgaagatgtagctaaggatctcaagaaaagatcatcctggataatccaggggggctataaatcgaatgacaagtgtccttggaatagacacccagaggagagattaatggagaagagatatgaagatggaggtagaggctggacttatgtagagctattagggaatagatttctgttgttttaagccaccaagtttatggtagtttggtgcaagatccctgggaaacaaatataccagttttataataaattgcttatatgactttgggctagactcttaatctttacaaacctcagttttctcatctgtaaaagttgggttattacacttgtctctcagtatcgtgaggaccgtgaaagctcacccaactcagtgcctggtacatgacaggcattcagtacacatcagattccttctcccatcacctcctacccattttcctacatgatgtttcaacttgaaatctttttcatcttctacgcctcctaaaatgtctgcaaaactaacagccctcccctgaagaatgttccattcttcaggagctgttcttaggactgtcaaattagaggagaaagcatggtacagctggtgtttttgcggcagttgggtgagagccatgtagatattaaaagtttttcaaatgcagttcattgaatgcagccctatagagaagcagctgaagtccacattgtagctgcagtgtggctggccagctggggtctgtttccttcacacaaggaggtctcagggtacattcccagccatggagaagagacaacacatgggaggggagtgcgtataatactctgggctgcagaaagaagccaatgtaaatggctttttgcttgatgtctttagttcattgattttaggcctagaaagtcgtgattgattacatcccaccaaatgcaggctggggaagtcagtgtgggaatttagagcatggctgatttaataaatgttttcagaaccatgtattcttctgaggcatgagaacgatgagaaaaagaacactggtcaagagctagcagagctagggtctggcttcatttctgtccttgattagctgtgtgactttgagccagtcatttaacttctctgaggcttcaacttcacagtgaggttgttggagccgtacatctcagtactagcattcaatggttccatgaaaattcacagtgatccccatgaggtcagtgtccacccatgtagcacatgtattttgtttggcatgcttgctggggagaggagaatcacaggaaggcaacaagggaagaaaattttaaaaaatattggatgttctcttatatatatcatccagggcttcatccgtcatccaggggagaactagagatgttttaaagacttgagacctccactgcctggtcctattgaggatcctgtgttaatgacagttttgccatctctaaatggcattgaaaatccagtgcctgggaataagtaggcaggggagtgcctggggacatggccctgttataaggtagtggtgtttgtttttgggacattagccctcttcccattgtctgttatgttgaggtcagcttccatgtacatttccctatgtctccgagcacattctgatcaattcattgatggtgagagggaaggaaagggaaggaaatagacatttttaaatgcctatgatgagctccctactgggaaggatctgtattcacagccatcttatggggcaatcactttacccacattttatacattataaacctgaggcttggaggtgttaggtaagttggataaagtcactaaattattaagaagcagagccaggaattgaacacatgtctgtgtgagggcctgtgttttatttgccttggcatcctgcccttatactatgacagctctgggcatgcattgtatacaatacaccagactgatggaaagtagcagtggaggaggggaggatggggataaagacaactatgtatcattcttattcttgaacatattatctaattagacaaataaaactaacataaagggaatacctatgacaagttaacaattttatcaacaatataaaaattagagatacgatactagcagctaacatgtattacacggtatatgccacatactaaagactctacaattgttttctcaattgtcaccatgatcccatgtccatatttcattgacgaggaagctgagacataagagagttggaaactctaccaaagttcacagcctttgggcttccagcagtgagccaggattccaatccagcccaactggttccacgcggtactactgctggtgttatttgtcatcaaataagggaacccaaggcccactgtaggctcattaggaggggtgagtttggtctgaaatggtcctggcggactgaagggaggaaatgaaactcaaaaagcctgtatggaaatagccttgtggtcatatcagagatcaggtttctaacgcaggttcttaccacctcatggtaggaccttgcagtaattgcagggcttttcccacacctcctctcatgtctcatggctaacaacctgttttcttctgcattctaatctcctgagaattctctctaaaatggaggggtcattagaaggcagatatttttggagcatgtcttccctggggcaagcaagtgcttggaaccaggggtgcagggaaagccgtacgaatccacacctgactgtgggacagtaatagggtctgagagtgttaggtcctgcaacctttcttgaagcacagataggagtgagtacagcagaattacggccctggattagtccaactggcattgctcatgtaaaagcaagagctttgtcaactgcaatcccactttaaagggtgtgtgggattgaaacaagatggcttgaaggaagagaccagtgcctgtgctctgtctttgcattgcacacaagtgtcccttgtcctgaaagaccaggtggactggataactgcataacaaagatgggtgctgctaagggatgaggggatacaaaaggggagaggctacaaatggcagagccaggtcaggtcttggagagtaactagtcacagattgcagtcagatcctgggctaacatattttaagtgaaaacaatggatttaaatgccattaacagagcatgtattctccaggttcttttataccagccagcttcactcattccagtgacgatcttgtcttacctcctctgtccctcactccttcactcttgccccagctatcccagaatagcttaactacccagagttgcatatcaagaaattgtgagttgaagagaataaagtgacttaaatagatgactgtttatggggttaaaatacaaaactacattttctgatttctagtttgatatttctccacaatgctgtactgaaagctggatttttctgtctttaaggcatggagaaaagtgagggagtcttggggtttctcagaatttgaggcaacatccttaacattgggcgaggtagtctggctattaaccatgaaaccctatggagtgagcttagttgaaggggactgagcaagccatttcagagcccagggcctctgtgacaaccaaacacatttgctatttggaaaataattatagatccttttgagagattcagctgcggataaaactggaatactctggctagaaaagtacttgctatgaaatccattcacctagtgtgatagattgttaaaaatggccacttttattctatccctgtatgcatgaatcccccctgcctcccgcaacccaacccagcaaggtgtctgtaatattcctcctatcaagagtagagtttctctacccacctcttgaatgggggcttgaccttgtgacttgttctggtcagtagggcgttagcaaacatgatgtatcagaggcttagaaagcatttgcatgtggggtcctaccctcttcttgacaccctaagactgccatgtaaagagattggagtgccttccggaggttgagaatatttggagcagacaaaagtcatcccagcagagactccctggaccaacagtgaaggtacctgcatttttgctaaaaagtccaagtggaagggtattgttatatgcagtcctatcatgttttctcaaataatggggaaaggacacaggtgtccatatatgctcgtgaatccagccgtcttcattggaaaacgtgtggcctgcagagattcagtggaatgatcttaccccaatagtccaggacagtggctctcaattgggagctattttgactcccaagagtcatttaataatgtctggatacatttttaatttttgtacccccagggcaggagtatgctactggcatgtagtagatataggctagggatgctgccgaacatcctaccatgcacaggacagtccccacaaccaagaatgatcaagtctgaaatattgatagtgttgaggttgagataccctgatctgggcaattgttgacttcatgtcaggttttacagagttccttaacatatctaggcaatacttcaccagactccaaccctagcctcatcttcttcaagagcaagttctctctttgggagtctctgaagagtccgtcaaaaacatttcttaacatcctaagacatgcctctttagggttggataaagatgattttctaattttaaaatgccttcctagccccagattttgtgcttatattgcagagaagtagattgaataccggagggaaggacatggatcaaggtggaaagtcagacgtaagcagagctacatttgcagaaagtatgagttcagtttagtttttgcttatggaccacaaagatggccctcacctctaaaccttgaagaattccagaatttttctgggagaggaacatctctatcacatctgccacagcggaaggctttgtgcaggataacatatcattggcttgagaacagagtgagcatgtgtggaagggcctgtaattattaatatgacattggccataatttatcatgtcataccacccacttacagcagcctcatcctatgaaatgctaaatgcctttcttatcaacacttgatgggaaaatgctgttctggcatcttcctctaagggaaacagaaatctaaccatgttccttacagcctagaactctgtacacaaagatcagacttgtttttctccctgaaaatttataggtatttacaaggactcatatcctgtttgctatttagaggggcaatggagtgagaaagaattatgtagcaagtttctttttcttgagatttgctcaagctgctctatgacttaaaaaaactcagatattactccccatttttatgggcagcttgctgttttctattcttgctttcctcaccgactttcttggcaaagctatgcttgagtactcctagcgggtggctagattctcagtgagatgcttctgtcataaaataccctagaaaaggaggttcaattcatgatccagggtgaagtccttgtgttttagtcctattaaattaaagaaccaacttttgctgagtgttccaagactggattctttcttccctgttgtcgtcagctctcagtaggtgcagaccttctgcagaactccgatggcacccatgaaggaagaggaatccactcttatggtatcagagctttatgaaccctttcttaatattagaatggaatcctacagccaagagaaaactgtgtctcacattcaaagaggcagacattggaaggaaaatattcaccttctgacaagttttaaagaaacagaaaatattgcttctttttaaatatttgcctgggtttgatcacttaatattttttaataggtcacaatactgcatttccaggtagatcgactaaaatgcttggagaatggttctgtttaatttatttgcctagttaacttacagcaaaccacaaattatttatttatgtatttatttattttttgagacagtttcactcttgttgcccaggctggagtgcaatggcatgatcttagctcactgcaacttcagcctcccaggttcaagtgattctcttgtctcagcctcctgggtagctgggattacaggcatgtgccaccacgcctggctaattttgtttgtatttttagtagagatgaggtttcgccatgttggccaccttggtcttgaactcctgacatcaggtgatccacctgcctcggcctcccaaagtgctgggattacaggtgtgagccacctcactgggccacaaatttttcatttaacacagttgaatatgatttcatgactaaggttctcattgctgagttatcattcttcagctggagaaggggagagggaaggtgcactgattcccaaagatcccctggcatattgtgaagcaagattgaaagatgtatcctggaaaaaattcattagtttgactctctttttaactgcattcctataaattgagactctactcatttaaggtggttatgagaattgagtggatataatgggatacagagggtggcacattgcaagctttgatgataaattatggatgttatgatatgtatgtactttcatttgtaagtaatgatttttataaaatattatgatacatttctaggctgaccttgaaggagaatactaacataactttggaaaaccaaaaaatgaaaaaagggtatccgtttctcatcatgaataggtttcaaatctcgtatttggagcatttcaatttaagtttgaagaagcaggactgaggtcacatttttctccattggacattctttctgatgaataagtattaaaactgctttgaatttggtttcccccttagataagaaattattttttccatacagtcttttctttgcacctgaaggagcattgagggtgaaaaatagaggcctgtttcctgttcctaactggagccctccaaggttgtcaaactagagcaacaactttgtgggatttatgcctgggacctgtcaaagtagaattatcatagcaaaccctctctgctatcaatcagaggggtattggggatggcaagggcaggcatttttcaaatttctttactgtgcatatttagtcttgtgcctgggggaggaagagctcctttgaacagttcttgtagatttcttttccatcagatggcagctcacaaaactacttaatcttccccaaagggcttctctcattggcctgctgagaaaaacagccaaggaagagagagtgggggaagacagggacaatccaacagcaaatcctagaaaataacgcattgctttcagaggacgtatggtctaagtctggtcacactgatatcatgacttagaaaagcacactgtccattgaaggttatctcccgtcgcttctttttttttttttttttttttttttttttttttttttgagacggagtctcgctctgtcacccaggccggactgcggactgcagtggcgcaatctcggctcactgcaagctccgcttcccgggttcacgccattctcctgcctcagcctcccgagtagctgggactacaggcgcccgccaccgcgcccggctaattttttgtatttttagtagagacggggtttcaccttgttagccaggatggtctcgatctcctgacctcatgatccacccgcctcggcctcccaaagtgctgggattacaggcgtgagccaccgcgcccggccctcccgtcgcttctaagtatcatgtggacatttagcaacagcacaaagctgacagtgctatcatagcggtgtgagtattcttctgtcctccagagccatttcccacatttgtcaagacaaaggttgaaggggaccggacaagggaaatgggtcacccattcattcccatctgtcagaggtttgctttgtcatgataacattcaaggagcatgtttatctatcccgctactggaggttaaggcaagggtaacaagaagagaagaaaccctgtttgaaaagtttacaaatcctgccgtgagggctgtaaacagagtccagccggtggtggagcgtgttaaatactgccacattgatagggacctggttccccggcactagaaatccactcatgtaaacagaggaactgttgctgtgaatcgggtctgttttgacttaaagtctaagaaacacattgccttcaaagtgaattcttaggtgtcacttcccataagttatggcagaagattacaaagctactgatataacatattagtttgatggacagaattatacccccaacgcttcctgctctccccaatgacgcacactaacttagtgtactgtgacagctgccttgatttaccaccagtccgggaggccaaccgggagaaggaacgttcacatggacgcagggcctgagactggcctggagcctagtttataaagctgccctgtaattcaccacaaatgtgtcaccattaaaagaggaaaaaaggattgcagataataaatactctttaatttattagctaacaacaaagagatcagagccagttgtgatgtgattgtttgacataatattgtcaaggaaaaaaaagctaagttgaccagagaggtaaattacacattcaagcagatgcatcaactcttggcttgtcataagcccagctaaacaaaacaccacacagaggggaggactggccaagagcagagccatttatctctgaaagagacatattcaagagcaagtgaaataagacatagttcttttggacttggtcagaggccaggttttaactgttataaattaaatgttttgtgtataggatttggcaattctagttgcctttgtcatggtagggagatgttaggtttttctgcctgtcttaaactcatggtttggtcagctggggtgtgtgtcctactgctagatattggaggatcactaccttttggtaattagcagatattgggaaggtttctgtatgtggcttgtgataaaatcagtggctttagaaaaacttgtaatcgccttcgttttctgcaattcttcctctacagttgttgagcaatactcacacaggtcaccaggcaggaattcatattgatattagactcgtggaacctgaggattggaagaaacatttcatcccgcatcccacccaggacatgcagacagttgtgtatgagcggggcaacttccagggaggccaggcatctgccgtgtgttattgtaacatagctcagagtcaaccagtgctttctgggcttttatttttatataagcgactgcccagcaaaactctcccatcccttgcttgggaaattgagttttcagatctaagtgggtacttttgctttgttttgcatattatgggtctttgggtttagcctattgttagaacagatttctgggttttattcaacagtctggaggcaaggatagagtcctgtgggtaggtttaaggacattgattcatggatcaacatttttttgatgtagttaattgatctgctatgaattgcatctcatttattttatttgttgcaaagcaatatcatgggggatttttgttagatgtcttattgaaatcaatttataatgtttatggtctcactgatctaccagctgaataactgtttctaaaagacagagctagaaggcagggagggagagagagagagagaaagggagtggagaagagagggggagagagagagagagagagagattgatttggcctagctcattctaggtaaaaagatgtactagctcttaaaagttgctactatcttttcaacgtgctcatatatcatatatttaacataattttttacaattttagtgtcattatttttagaatcttctgttcctcctttaaaaaatcaacaaaaatatttgcccaaatttgctttttatctgtattttttcaaatattagtaacattgtttccatgagcagatctataagaatttttttgttgttgctattgtaaaataagatactatttgtataggtctagacaccaggcatctcctatgtctcataagctctctagggcctcattcttccatttcttttttcttttttacttttcactcatcagtctagcccaaggatataatttcatgatggagaaaataatgacaaaacaagagcttagttttaatcattctgcctttcctctgtcatttgggatttctttttttaacaaccattttccaacagtagacttattttcttcctttgagcatggttttcataagtgacttcttaaaatctgaattcactagaatatgccccatacagttatactagtttggtttctttcactgcttccctatcctcaagcttccccaaccttccttccttgttgtcaatattcataattatatactcagaatttcacttttagtagcatccttccttcttgaatttcatgtcctattaggatcaatatctgtggaaattactatactatactatactataccataccataccataccataccataccataccataccatcctatcctatcctatcctatgctatgctatgctatgctatgctatgctatgctatgctatgctatgctatgctatactatactatactgaaatgctatagtctcttaaaaataaagcaaatccaatcaagagtattcatatatttgtgttccaaaatatgcaaagttatctccaattaggcacggtcactttctcctaggggtctcatatcttccataccaccaatctttttattttttaagtttgatcatgttggcatttgttctgctatataatgtatattatgttgctactttttgaatatgttcactaaatgcacttctgcctgattttcctggtttccaaaaaggattttccctcttcacctcttctcctctcctctctctctattggaaatacctttcttttcagcaaggtgttctcttccactgtcacattctgggcatgattacccaccaccgtgagtttagttcaagttcattttattttagaagttacgaccggttttataggaacaatgtgcctttatcatgtcaactccatgttgaaaaacctttagggcctcctcctcgcatttgggttacagccacaaacccttagcctggcttctgaggtccacttaaccttgaactcaatgtacttttttggcctaaccttccagactttccctattttcactcagcctttcaaatcaactgatctgctcatagccagcaacatgatttgttcttttattcgttcacctctttgggctttccccccagaccttttctagttttcttaattagaaagtgagtcaccaaaaaggtcattaacatcaagtctttcattgccttttgtttttttctctatgaagaataaaataattttatggtgcaaaatgaacttttgaaggctaagaaagaacataaagtttgggccaaccaaaattaaaagtgactcacaattaatactaccaaagaaggcaatcttccgctgtccttaagtcagcaaggatttatgagagtgcttgatgattgtgtgttgcatttcctctgttggaaatgatacctagaattttagaagcatagattctgaaggatgacttcataataaggattttaggagcccactgttacccatctcaaccttggatgcctgaaatacactgacattcctacacatggctacatatcattcttattattcagtccacagccattgccaggatagataaaaagcaactgtcatttcacatcagaccaagctaggaaagtatatctttcctcaaccaagaagatggagtatgaaccagaccacatggcccagtggatgggaattgatagtgcatacagtagctttaaagcagcatggagcaaaatagatttaaatcattccgaaagaaataaatcctaacaatggatacattgtgctgaatgaaatgaagctcacaaaagaattgattaggaagtataccaaatggaataaaatgtagcagaaaggcacatattagagagaataaaatatgtttcagtctgaaggggatttaatttactaagatacaactgaccagctataaagcagatgaataacatatgtagtcaagtcaaatggacattcaatggaaataggtttatatagatcaatggcatcatgtgaccagtttcattcttctaattctatggctcattgtgtaatatctttagctctctcaagaaaatctgaggcttttcctgaatcctgaaagagggaactcaccttaaaggagtgtatgattaattggaaataggttattgtttgttggcttgtcttggtccagagaaccataataattttctggaattagaaggattttacagtaaattgcaatagagtatcacagtgaagactatttaagcactttttcctccaatgttaagttagttctactggtcactgtgctgaaatacttagagccatcaatggtcttcatttctctttctaggaaacttggaaattttaggtcaatattgaaattatcttgctgggaattttctcccacatgcaaacatattcattaaacactctgttgtgcttcagtcggagtcctttggagaatgtaattctcaacatgaatgaagcttatttccagcgttattcacagtggcatatcaagggcaggggggaagacagtggtctgctccaggtacagacaatgaggggatgcattgtttgtagaaagttttaaaacaataataaaaccaactaaaattttgtgtatattctgttatcaccatgaactggcaattcaggcaattaaagtgataaaaatactcatctctggaaaaaagctgtcaatctaagttctaagtaattgccaggagttctgttgtattttaaaataatgactattattgttaatatttattacattttaacacacttaaaagtttatcttttaagacacatcgtattctatatggagttactctggggaactcctagctctccaggaagccttagcatacatgaacttagctgtaaattcacagtggtttggaatattagagatcacatcacagtcagtgtctctaaaaccttggtagcatatatttctgcatttgaacaatatatttgaactaggcagtcgtagaaaaatgattgagagataaagaaacaggtcttgagttagttctgtcattcaatgagactacttggagcatttacttgtttttaatatttaaaacaataaaataaaatacaaaccatgaagtgtactattttgtctttggtaagtgcaaatttaagtttatgcatgaagatctctaatatatttgaataatagctttacattaaaaatttaattttctttttaattgttaattatttcaaaacaaaagcaaattaaaaaaataataattactaattacgtgcttataactgaaaagaattttgttttatggaggaaggggtattaataattatctgctctgggtatcaaatatgctagctatggcactgggtattttctttttcttttttttttttttgagacaaagtctcactcttgttgcccaggctggagtgcaatggcatgatctcagctcactgcaacctctggctcccaggtttaagcaattctcctgcctcagcctcctgagtagctgggattacaggcacccaccaccacacctggctaatttttgtatttttagtagagacggagtttcaccatgttggccaggctggtctcgaactcctgacctcaggtgatccacctacctcagcctcccaaagtgctgggattacaggtgtgagccacggcacctggccagcactgggtatttttatttttattttggttacagatgataaaacaattcaaattgctgaaaaaatatgtaatttaatactttatcaatttccttttatcttgcaacaaaccacctcgaaatttaatggcttaaaataagagttatatataaggtcacagtcctgtgggttggctgggtgcttcttatctggactgacttggttggggctggatggtcacaaatggcctcacatgtctggggctcagttgagatggctggaatagctttccatgtgatctctcttcttccagaaagctagcctgggcatgttacctggtgggagaaaggttcccttaacaggagaaggaaaactccatgctcaagtaccttttaggcatttccttgtataacatttgttaatgactcattggacaaaacttgttacatggccaagtccacatacgaggggtggagaaccagactctacctcttgatggtaaagcagtaaggttacattgcccagggaagtatgtatagaggtaaaagaaatttttgcagccttttttgtgaataatctaccacctacccataagggttgtgttatctccaggtattcaagtaacattggcagtaatttccatcttcatacttcgtctcagttctacttttttatgtagttcatgtagcctttttaaattaaatgtattttttttacttggcatataatacttgtacatatttatgggatacctagtgatgtttcaatacatataatgtattgcatgatctgatcagtgtaattagcatatccctcatcgcaaacatttttcatttctttatgttgggaacattcaatatccttcttctagctactgggaatgatataatatattattgttaactgtaatcatcctacaatgtttttttaacatgagaaattattcctcttatctggctgtaatttttcatcctttaacaaatctccctaaccctctctttgctttacccttcccagcctcttgtatcatctcttccacttttcatttctatgagatcatctttttttagcttccacaatatgagtgagaacatgtggtgtttagttagttctgttcctgacttatttcgcttaacataatatcctccagttttatccatgttgccgtgaatgacaggatttaatttatttttatggctgagtgatattccattgtgtgtatatatatcacattttctttatctactattccgttgttggatacctaggctgagtccatatcttggctattgtgaatagtgctgcaataaatatgggagtgcagatgtctttttgatatgatgatttcctttcctttatatacattcttagtagaaggatttctggatcatatggcagttttatttgtagtttttaaggaacctcgatactgttctccatagtggctgtacaaatttacattcccaccaacagtgtaaagagttcctttttttctctatcctcaccaacatttgttattttttatctttttgataatggccattctaaatggggtgagatgctatctcattggtgttttgatttacgtttccttgatgattagtgatgttgggtatttgaaaatatatttcttggccattcgtatgtcttcttttgagcaatgtctgtttagatcatttgcctattttcattcttaattttttccttcactcattggttgttcaggagtatgttgtttaatttccatatattcatacagtttccagcattccttttgttattgacttctagttttattctattgtcatctgagaagatgcttgatataattttgacttatcaaaatttgttgagacttgttttgtggtgtaacatatggtctatcctggagaatgttgcatctgctgataataatgtgtattctgtagctgttggctgaaatgttacctacatgtctgttaagtccatttggtctctggtgcagtttaattccagcatttctttgttgattttctttctagatgatctgtccaatgctgagagtaaggtgttgaagtccccaactactattgtattggggtctatctctccctttagatctaataatatttgttacatatatatatatgtatatatcagtgttctggtgttgggtgcatatatatttacagttcttatattctcttgcttaattgatccctttgttatcatataatatccttctttatctctttttagaactttttacctgaagtctgttttgtctgatataagtgtagctacttatgcttgcttttggtttctctttgtgtgggatatctttttccatcccttcagttcaagtctacatatgtctttacatgtgaggtgagtttcttgtcaacagcatataattggatcttttttttttaaacccattcatcctgtctatgttttttaattggagaatttaatccatttacatacaaggttattactgataggtgaggacttactcttgtcattttattcgttgtttcctggttgtttggtatattttgttctttacttcctctcttattatttaattttggacttagatgttccctgtagtgataggtttctcttcttcttttgtgtattgccttgcttcttttctctttcttccttgtgtattgtccctaccagtgagttttatagccattttttgcatgttttcatgatgatgatgaagattttccagatgtaaggcttccttgagcatttcttgtaaggccaatctagtggtgatgaatccacttagttttagcttgtctgaaaaagattttatttcttcttaatttctaaaggatagctttgctaggtataatattcttggctgacatttttttttcttttagtactttgaatatgtcatcccattctctcttggcctataaggtttctgcggagaaacccattattaatgtaatgagagttcccttatatgtgacttgatgcttttctcttgctgtttttaggattcaatctttgactttgacttttgacaatttgagtataatgtgcctccaagagaacctgtttggggtgactctatttggagttccttgatcttcctggatctggatgtctatctttcttccaagacttggaaagttttcagctattactttattaactatgttttctgcacccttttccttctctgaaatatatgaactacacaaattcatatgccatccttgtgcaggggccatgctaatcttctctgtatcattataatttgagtataggtaccactgaagtgagcatttttaagaaataaattttgataagatggccaatatcagcaaatggattacttcttgccagcttagcaaccctactggaaagagagcttgttccaatagttcaagacaaaatttcaagactgacttttattggctggattgacttgcgtttcttttcttttcttttttttttttttttttgagacggagtctcgctctgttgcccaggctggaatgcagtggtgcgatctcagctaactgcaaactccacctcctgggttcacgccattctcctgcctcagcctcccaagtagctgggactacaggcgcctgccaccacgcccggataatttttttttttctgtattttttagtagagacggggtttcaccatattagccagaatggtctccatctcctgacctcgtgatctgcctgcctcggcctcccaaagtgctgggattacaggcgtgagctactgcgcccggctggcttgcgtttcaatctaagctaatcacctgggtcagacccacacctcgtaccaggaactgggctcatgtccatcagaatcatatgaaatgaaaggtggaaggcactggttctaaaaaaaaaatgacaccctagttgttacaaaatgaacagtgaattaatgctgggcatgcaaaaataagagcctttgactaccctcttgtgcttaggtcatagtatcaaggagataactagatttaggctttcctacttaggtttattgttatttaaactcacttctcataagccttgaaaagcaacacacatgccttcaataatgggtctgcaagttgaactttaaatatttgctttacatattttttgaaagtcacatgtgcaaacatttttatatacatacttacaaaggtagataacatttctgcaggatgaacccgtcatataaactcattgatgtgccacatgtgcacaataggtggattatgactaaaaaacaaatttagaatgacatttgagcaatcttgataagtttatggagttgttggagaaggaaaaatattagtggggaagaaaattgttggcaataaaattagaaaacgagcctcatgtaatcccagctacttgaatggctgaggtgggaggatctcttgaggttaggaattcaaggccaccctgggcaacaaaacaagaccccatctctaaaaaaaaataataataataaattaatcagatgtggtggtatacactggtagtcccagctacccaggaggtggaggtgggaggatcacttgagcctaggagttcaagctatgtgcatgccactgtacttcagcctggacaacaacgtgagactccatttcttaaagtaaaccaaaagccttcaaatgcatataacctaaaatcaggaatcaccggggttctcagtgattgaaatctttaccaccagtgttcactcatgctagcctcatactcccagcctgctccactcatgtacgcgcttctcatcaacatgctttattttctgaatgattctccgtgaaaagaacaaagtggggtgatggaaagtatagtcacttggcattcaggtttaggttctggctccggcaccgtgtgaagtttatgagtcttttcccatttctgggtctcagcttcatcttctgtcaagtgaaagattagggtaactgatctcaaataactctctggcatatatgtgttcggcacctacatcttctctgattggtcctgggttattcaacatctttcctctgcaacttatttagccctaggtttggggaatgggcactaacttctcctgtacagattctttcccaagcttccaaatccatggcctttagttttgaggttctgctggcccctgtttttttccccaaagcaaaccctcttgacaaattcatgctttccagcaagcttaccagggtaagtcatgctggccagggtgacttgtgacactctgtttccacagctggctctggcctgtgcctgactgctgctgtgtctgattgttaccagccatttgccctttcttaagcccttgctaaccattttctttacagaatatatatgttatgtgccctagcataatttttctcataatgaaatagaatcattttcatagaactttgcaatgttgttaacattagcattttggggaaagtcttctttatagttgtttataatctcattttcaaattgaaaaaaaattcaaatgctatttttagaaggatacattccaaacattaaatgattgatctttactttggaaggtacctcttgggtcaccttttcatctctagggagttgattccaaggcaaacttgtttctgatgaagtgtttcaatatgctttattataatctgggaccacaaaaggaacttctaacaaacttttttttttaaaaaaagatcatctgtttatctcattctctctctttcttatgcttttgcaaaaactttttatcagtttacagcaatatgaaattcaaagaaaaatcaaaatagaaaaaaactctccagtttgaaaaatggagttgatgtgctattttaatttggtgatgattctactgaggcattgtttccaggtttgcatgatggttactttatcttttttgccttttagactcaataagatatttctccatagcacattactcaagcttctacataactcatctcacatagttacgaagttttgtccccttggactgtaagcccaggcagggatgggagcttgttcattcttggatccctaccgtcttgcatagtgcttgctatgtagaaagcactcataggctcaagtggaagaatactgtgtaggagcaagaataatatgtaggggtaaaatgttgaacatgcataaatattgaaacaaagaaataaattgattttggtgataggtgaccctgagagggataaaagtgtaacccagaggccctcctatgttacagtggcaaaacctctgtcaactctgatgtcttctgctacaggttaaacaagaatggaaagctctattcaaccatctaaaactctgccttcataataatgatggatttgctgtcatcataactcattcgtaggtaatcttgcaagagctgaactttggaactactgccatttggaagggttccattcactctaagggaaacctgagaatctgagttcatttactttttattcccccttttagcagtaatttgttcatttacctttaatgttgaaaggaagcaggttgaggccagccatgatggctcacacctgtaatcccaacactttgggaggccgagaccggcagatcacttgaggccaggagttcaagaccagcctggccaacatagcaaaacactgtctctaccaaaaatgcaaaaaattagtcaggcatggtggtacatgcctgtagtctgtagtcccagctacttgggaggctgaggcatgagaatttcttgaacccaggaggcagaggttgcagtgagctgagattgtaccactacactccagcctgggtaacagagcaagactctgtctcaaaaaaaaaaaaaaaaaaaaaaaaaaaaaaaaaaaaaaaaaaaaaaaaaaacacggaagcagattgaaataatgtgttttccatttgcaagtggcatggtcattttagttgaaggcatgtccactgcgagtatttcggtcagcttggctgcttctcatgctgtttgcccaattcagcactacagattttgctctcttaaattccagctttatcccataggagaggtgcagatttctatttctcatctctcgtctgttttaattctttgggagaggagtcctgagtactaaacagaaaggtacgcatggagaaatgtaaaacatattttcaggcacctttgtgaaaggaaaatttaatgggacattatagtactatgggaaatggagagagataagaatcatgccccatgcttaaccttttggactcatctttgccaatttctatgtgcagttcagtaaattaaataagctttccttagcctgaaactgtctgtgatagtgcaacctttcactgaggtatcacagacagacattcagcgttcaagacaggggcctgacacctttcaaaagtgaaggaacctgtggcaattttaaacattccaaccatattaattccagtgacagttatcctctaagttatttgaaatggattctccctcttcaactttcgaaacttatatttgatccccatggcctctggggcctgcacaggggcactctctgtgactgagtgcgtgaacagcaggaggcagaagcaggaaattgttgatccggtccgtttatgtctttcctcctcctttagctgttctctgtaccttattcatgtttctaaggaaaagccttgcatttccaaaagaagggttgaataacggtttggagttctttctttgagggcaatgtttttattattgctcttccacccaggctgaaagttgagtgtcatctctcaagcataagcaactaggcacttcacaatcaatactgggctcagtggttgagccctggttaatagagctgcttcttttcaggtgctcacactcagcgcagccgaattctgccttctctgtcctgggaggacacagggacctgtgcccttctccaacagtgggatcattctcgggaagtgctcctcactttccacatggtcaggaagttttggatgtctataacaagcacaggcgaggcttggtatggagcccagtgtttatacttaagagagtgctgggggaatggtcacagaagacccatcaggcccttatgggctgagttccaaggtgactgtacattggttattgttggggaagagtcagatcttcagctttccatgtgtgttggtttgatgttattactagtcatccatgtgttagaaatgaccttattagttcatgtctaagaaactaatttacaaaccaaaagactaacatgttatttccatttgggtgagggatagtattcaggaaaccaccagactgttcacatttgcattctagggacctcccttcctggtattagactaactggcaaagtaaattaatcatctgcaagatttctaagtgagaatggatgattgcatagctgttaaggttacaagtcaaatagcctgtgtttggaatcctggccatcacccttaatccctacatgatctcagaccagttacttaccctctttaagccttgattaactgatctagaaaatgagatactaagagtacttacctcatagagttgttgggaggattaaccgggataataaaaaagtgtgtatgaaaatgcttggcatataataagtacacaataaatattcacactagtattagtagtataataataatcatctttttttgtaataaaggtaattggatatgttcctaggccatttcatcctataatgttagaatctggagacttacacctgcttctccatagaatactcctttgcaaggacaggattacctgttagctgctagaggaaggctgacaatttcttatttatcaactcttctttctctagatcctgtgttgcttttttgtgtttatgaatacatatttaactactgtttatagaatatttgctatatgccgtaatattgtgctcttcatcatattacctaatttagttcttgcaatacctgtttgaggaaagagtcattatctccatttttcacaataggaaactaagtacagagaagtaagaaaagcgaggaggtagaacagctggggcttcagcttaggtctgtctactaaattccatgtctatgacactaggctatcctgcatctttatttataactcagtatattagaccttgagttaattagattattactaattttatatttattacaaagtggcatttttgatgagttttgagaaatgccctagtatatttacatacattgaatggatgacaatttgaaacttaatttcaaaatttcacaagttagaatttaaaaactagacttgtaacaggagatgagtttgttttgattccggagaacattcaatctctgggtgatgatccaattaatataggctagagtttcccaggtagatcttatgggaaaatgatacaggagggacacattatcaagagtgctgataaattcaaattgtaactaacctcccttagatagacccaagatagtcatgcctccttctatagggactctttggggcatgatagaccagatgccatgataaagaatggcattcccacagttgagatgaatttccacaggtcaccatatgcagcttcctttctcagcaagaatatccttaactttatgcacataatttttttttgttttttttaaacagctattttgaggtataattcacatactatattgtttgcccattcaaattatataattcaacaatttttgacatattacactacaacttttaaaattgtggtaaaaatatatataaaaaatttaccatttaaacttgtaagcataaaattcagtggcattaatgatattcaaagtgttgtgcgaccatcacaactatttatttccaaacccttttttatcactccagtagaaactctataattattaagcaataactccctatttctccactttccagccctggtaacctctattctatttctgcctctatgaatttgcctgtctgcttcatgtaagtggaatcatgcaatatctgtccttttatgcctagcttatagacataaaccttgaaaacaagatttatctatgtggaagcctatttcagaaatacattccttttgatggctgaataatattccattgtaaacataatattctggaatgaagatgtggattccatctatagctgtcaatcttgtgagtaaaatcaccagttttgtgtgaaatgtctcatttgacacaaccaacttggaaaacatgttgaggatatttctagaatggtacccaatctattgacccttgtattattatttattcggtgtttttcttgaaatcagttcacttttaaatgtcttaaatatttatcttattttgtcctaattaatgttcatgaagtccataggttgacgtaatattacatattgctattaaaatgatttacatatatttgttctgtatacctcctaaaatgtatcttctacctcagccacatataggctgtcaataacttctctaattctcaaacttgaggggtgggctgtgtgtcagaacatactagagtgccagattccctatggaacagaaatgaagaggagaggaattgtaacaaatataacctggtgtgaaggccaaggttaaccctaacccaaaccctaaccctgggagtcaattagtaggttcaagtctgggctaaaactgcttctaatcagctgtgtgatcttgacacatagtcctctgtgccttagtttcctctctgtcttaagcaggttgaagtagatcatctcctcctgttgctcattcctggatgtcctgcttctctcccacattcaggaatgacagggctagtgtgtgcttctgcacttgccctccatggggctgtactggagggatttccatttctttggcttcatggtatttacacctctctcttttcacttctctcacccctcttatattagatcaaactcgatctgatgtaactcttaatgatttcctttttaaggaggacattaggaaagcctgcatcaaggacatcacttaccttcatttagaactgtgggcatctgcactgtgtccatttcttacagcgataaaatggcagtaaatcagaaaaaatgccatgcccttcagaaccttgagaatgagctcctgagcattctgcttacggggatgtaggcttgtcagtgagtaaatcagctctgtccttacgcccccattgcatcagggaaatctctgactttgtgggataggtttgacgtgtcagtcaatctctctctacccccatttgagactgagagtgtatctctcctgtgttttctctgagcgtgtttagtgagcttattggccccctaggtttcattgccagccacagcttagtccttgtcagagagattattatatgaaccctaggtgacttctgactgcagaagggccctggatttacatttttgcattccaaagtcaggaatataaatgactaatggaacactgggccaccgaatatttatatatctattttgaaatttacatttctccctttcttatgatggggtttgctgctcccggggtcgtagttcatgggccagtagcatccgtggtgacaaagcaatcatctggggagagtgcttcccagccccagtggcacactgtgatgtgctgcaggttattatgccagcaattcagcagtaatcgaaccccccatctccttggccctatccctgcttcccttttatgatgtccaataaattttacatgctccaatttgcctcatccaccacctaatactgtttgaattaagaatctcttccatagctttcaacaatgggaactttgctttctccaaaattatttataaaggccactcatgactgtgccagaacggaggctggactgtgcaggtagagacagtgcacatatgctggtccatatagaagatggggttgcccagttgttgaacttgctgactacatgatatattgagatggaagaggatgtctatagatacatactatatctatatgtatgtatgttttgaatgaaaaaattgtgttaaattaggaattttttaaaaggtagagcatccatttgaaagttccctggtccctgatacttttcacgatatatggtacatttaataatagcagtaacaacaataatagcaacactacttaagcgtttactactcgctgaattattctaagccctttgcatgcattttaaaattccaacagccccatgagattgagcctttttgtaaacctgcttataaaggtggaaataagttcagagaggttaagttcctcaagattacatagctagtaagcaacagggctaggactagatgttgtattgtctgatacctgtttttaacatcacctaataccaccatgtggtgtaggcaggaagcagagatcttgagatgaatgttagtacatttctcattcactcaagccactcaccttttctcattcactcaagccactcccctttttgttccccgtcagtatttacaaagcatctattctgtgcacaccctgttctgaacactgggtatcaatacagcagtgaagatgacccgcagtccctactcttgtggagttaatattttaatacttgtagtcagacaatagacacgtaaagaaataaaccatgcactttctaacattggtgtctcaaagaaaatgcatgagagcaacgcaatggaaagtgtccagttggggaggggagctattttcactaggatgccaacaaaggcttccctgaagactgggcatttgagctgagacctaaatgtgaagatggctgggagctggtgtatggagcatagggttcgctagaggaaaggcagctgtaaagacccaagtcaggaatcagtgtcttgtgttggaaagccaggaggaagaccagagtggctgaagcattattagctgtagagagagagtagattatgaagtcaggagattggcagacctcaaggcgtgcagagcagggcagggagtgtggatgccgtggtgttttcagttctttcaatcaatattttactgcctgcagcccattttcttttacagcctgtcttcttttccttctgctttgactcgagtcttacctcataatgggcattttaatcctctctgtgatgcaatccaatgcttcttgctgggcaccttgctttattccagctcagggcagcattaaaaaagaacagaggaagtctccagccgagaggggctcaggaaggggtgcaggttgcaatctaagagctttaattaaatcaatgccgtgcacatcctgtccacaaagctgggggcaattgcatgctctttactgacgccatgatatacacttaagagctgtgtgacttcacagaagcaattaaattggcctgtttaatcagtggtaaggccaccatcaataacaattattatttttattgatttgataagtgcacagtagaaataatcacagagaatagctgtctctttccccctgtcctttgcctaaatgctaaaccctaggctacccaggccaaatctatagtgacctcttgaacagttttactacagatccatatgtaatcaagaattcctaccttggctaggcggctcacgcctgtaatcccagtactttgggaggccgaggtgggtgaactgcattaactcaggagttcgaggccagcctgagccacatggcaaaactccatttctacaaaaagtacaaaaattagctgggtgtggtggcatgcacctgtaatcccagctacttgggaggctgaggtgggaggatcacttgagcctgggaggtagaggttgcagtaagtcaagatcatgccactgcactccagcctgggcagcagagttagaccctgtcttggaaaaaaaaaaaattcctaccttataaaatttccatgctaaaaaaaaataatccatgctttttcattgaaacagaaattttcaactttccagtcctttgattggtaacaaaggaatgctccctatggcaaataattaaatctgcattttctctttcagcctcatccatcttgtttattgttttcctatagctcaaactatgatctcattttggccagaaatataggttcagtgacagaaaacaggcttggacattgcatagctgtggatatatacacgattatgtggatgttacagaacctaaaggaagatctaaatggcattataagaagctgcttttaccccaagacttattatctttctccatctcacttatagtttagcatctttgcatttgtagttccaaaaatctgaattacttcccctcgccttcttgtgaattaattccatatacttgtgaccatgggagagaagcagactcaaagtataccaaaattggagtccagccttggggaatgaaagagtgaacctttgttcagggagaaagaaggggccctgatttatgtgtgcagtcactcagtaagaaaagctaaaatgtgtatgggctacatccctctccactatcccactgtgagagatccatgaaggaatagggagggattgttggtcttccatggtacttctcctggaggatagcatatgttattcccacctgacttcattaaaggtaaaggtctcaggaatcttgaatgacaatcacagagatgcccccattccaccattcaccttggatttttggccaggttggcttcctgggggaagagggttacaatttgtctactaatatatggacacattggtaaactgaatttaaatcctcctcaatggacttgatgccacatgggacttgtatggggcattgctctcacagttctcattcaagagctgctttgtttccagatagttctacagctcttcaatagaacctggaatccatggtctgtgaggagaaacagtgacccaggttgtgtcagatgtttttatacgtaccatgaatggcttctgacatcacaaaggtttggaaaatgcattaaattcggtttacctcttaggcattaacaagatacattagcatgagggctttgagattctagaataatttctcagcattttccaaacagactcagtcaaggaaccctttgtcagagtaggcctattccccagaatatacattggaaaagctggtctggaggcctgtattagtttgttctcacactgctataaagatactacctgagtctgggtaatttataaagaaaggaggtttaattgactcacagttccacatggctgaggaggcctgaggaaacttacaatcacggtggaaggcaaaggagaagcgacacacaacttacatggcagggagagagagcaaagggggaactgccaaaaacttttaaatccatcaactcttacgagaactcactcactatcatgagaacagcatggaggaaactgcccccatgatccagtcacctcccaccgggtccctccttcaacatgtggggattacaattcaagatgcgatttgggtggggacacagagccaaaccatatcaaggactaaccacttatttttttttcttgtaggcttgcatatgtacctatacatggggtgagcatcctctcacttagggcaaaatttttagtgaggaattctatgacagtgctacatatattgtatatatgatatccctgttcccaaatgtaaacatctccacatgtatcccttctagaccaaaacctttttatctggcttcatggaaagctgtagtgttttgggctagtatttaccattagatctaaaaacggtgcatccttggattccttttgttgaattttgtgtaaatatttagggtatttacaccttgacaaccaatgactttaaagtttaaaaactgatatttaactgacttttatacttactaatatcacattatagatgctaaagaatcattgtaaccattagacaccaacgatttctttcagagtttgttaaaatcacgttgccttttttactatttttaaatagtatgatatctaatctgttcattgcttgtgtgtaagtttcctaaactttgccatacctccatataacttgtactattatgtacccagtatgtgtgacagggttccctgatggcaatctccaaagaaatacaatttgggcataaagtaatggtgcctaaattctgcccagaaatgttctgaaatgggggatagggttgaggtgacatgtagttccctctccagaagcaggggagtggaggcaggctcctgtgtcctccagtatgtttcccatccagtatccctggatcaggtgaatgaaaagggcattaactaatggggatattacaggatgaggtcaaatgatccatgtagagttcataccagagtacctgccatataggaaatatccaagtaattctattgttgtcatggttttattgtcttcaaatatctttattttcttttatggatttttacatactacctttttttagacagagcaggatttacttttttttagacaaagcaggatatatatttctaaacatttgaagatatttgaaggtatttgtcatcatcacttagtatcccaggtatcccaaccattccatcttaatagtatctgagtcattcatagtatatcctagactgtttcaggatcaccagttccaaatattggagtaagttattaaacaagtcttttaagatcttatgaagatcttaaaatagaccaggaagagaagtatacttgcccatatttcctccatttagttaatcccatctaaacttgctgcacataaattggaagaattaaataaatgagttgtgaaaatggtgtttttaccatcaaattagatatggatcatctggctataatgggcctggggcacaatctatgcatattcatttgaaaaccaactgggatgtttaaaaaagtgagcaggtcaataagaatacaatgatttctgtagactggtaatgcatggccaggcattaaaagtggatattgtatgcatctgtgtgtgtgtcttggaaaagtcaagtagaacttgatttgggtaaaacccaaatgtttctgtgttctttctagtcagttagttattttgtttagttagaacatagtaccactgaggtaaaggttacgtattttattcttgtgagagctgctttgctatgtatcagggcaaaaaaagaatgatggaacatctctactttttataaaaattagatcaacaatcactgtaatggtagaaaaagagagtatatgtgttttgatattggagcggtttttacaaaaatcatatatgtcaattttacacaggatcactcactgcttttctgctctgaaggatgaagatcacaactttccctaccattcccctacctctcaatttttgttagttacattgttatcattatattgttaatgacaattgcattctcctctataacaatgctttccatagttgtttagtgttggctccatatttaagtgaactcagagctcagtggaagttctttggatgatagctctccactcctgaattcttactccagccctaactggctgggctttcttctatctttttcaaaaagggctcatgaggcctgaatttcttaagttccatgcttgttgtatttgaatgatattttagttgggtataatagttttaggctatatatgatttacatatatatagaaatatttcttcattgtttccttgtattgaatgtgattctggataagtatgaggtcagactgacttttcttccttgtaggagattcttttttcttccatctggttgtctagagatttttttcccctgaattttagtaacttaattaagatttatttgattgttcttcattctttgtatcatttttttaacttgctaaactcttttgaactatatttttttcttcattttggggacttttttaagtatatgtttgaatatattttctgtcacattaattgtacacatacaaatattactgtctttatttcctatgagtcttaaattatctaattattttattttatttttcatatgcattcactgtgattatgtcaaactgttgctctgtcagtaatttgatttttagtgtgacccctctgctctttgatctttccaaattgctttttacttctgaaccatattgctttggtctttgtttctttaggtcttctttttaaatccattaaattgtgtgtgtgttggttttttgtttcatcctatttgtagttggctgaggttcttgatgaaaaaattttgcagtagatttggtgagtttttgcacagtatttctttaaatacttttccttcacaacctcttcctcttctctttatattaacaccatatacatatatgttagatcttttcatattgttccacaggtccttgaggctgtattcattatcattgttttcctgttttccaggttggataatttatttttatgtatcttcaagttcactaaatctctcctccgttatcttcattctgttattgagacaatctagtgaatctatctatctatctatctatctatctatctatctatctatctatctctttctttctctctttctttctctctctttctttctttcttttgttaattcttttgttcattctgtctttctttcgttctgtatttctgtttttgctgttgttgttgagaatgggtctcctgttcacccaggctggagtgcagtgatgcaatcgcggctaactgtagccttgaactcttgggcttaaagatcctcctgccttggcctccctagtagctgggtctacaagcatgtgccactatgtccagctaatttttttttttcttttttgcagtgatggggtcttgctctgttgtccagactggtctcaagcccctgggctcaagtgatcctcccaccttggcctctcaaagtgtcaggattacaaacatgagccactgcacctggcctctagtgaattttttgtttcacatgctgcatttttcagatctaaaatttctaagttttttatagcttttgtatctttcctgagagcttctacttttctactaatttaaagcaagctcaactttatctcatggactatgcagctataataggtgctttgatgtgtttatttgctaattccaacatctgagccatatatgtggattattttttttacacaaatgtgactaatacttatttgtatatttagtaatttttggcttgtatcctgggcattttgaacattatgttgcttcaatattggatatattacaactctgtgaagaatattaatatttacttttttgttttatgaagaattagcctcatttctttcagactatgggttctgtcttgcctttcgtgggttccaatcttggtccagttttcaaagcctttgacatcctcctcttgatctgtctgtgcctgtacactcaagagttagtatgaaacctggatggtggtttacgatcctcattccgttctcagagcccttgctaatctgctttggatatgtcccgcacatccaaatgcacagctcagagatgagctgggaacttgtgtagtttcatatacagaattagagtatccccttctccagctctctcactctgggattccctccacaccttccagtccttaagggctgtttttcacagctcttcagcccagaaatttgaaatagaaatagaaagtggagtttgagatttccatggtactgctgtatcagacgactctgtgattggggcctgcatttggggaaaagccacattaaaaaagaacaataaacccagaaattcacctcttggtgggtagcttctccataagccactggcttttgttttacttttccccatcctcagtatccttgtattttgtgcagtgtttagttgtaatcagtggaagagataggaggtagtgggcttaccctctcatgcaagaggcaggctcacattcaattaaactgcattcagctgagcccctcttttattaaagtcttgttcttactaagttgttttatagcataaagctatttggatttttttttctgctgttcctttagttgttgggtcctttttgtgtcttttgcatgatgtgcttctgtcctccttttcctggttttgttgttagtctgaattttttgctgtgctgtttgttttctctctgatcatgtttgagtaactctgaaatatacagtgtgaatggcttcttaattatcttcccacctctcataatatgagcttcttttaccctcaaagttgcagtttgagaagtaagtatttcatgttttgtccatgttctgtagcttcagaaaatggggtagggaggagaatagttcaactgagaagggatgtgatctttattggaatagccagacttaattctctcatctgacattctgttaaaccttcattagggtttacttttgggctttggatgatttctctaattcactgggtcatcatggaattttcatgcccattagagggtgtacccagttgttagttttctgtgtttcatttgcttttcccagtggttacttaatccattactcagtcagaagaaggagaagagaagaatgcctagataaagtttgcttctttctagatttggatgcattaatgagaatttttcggattttgcagattccctgtataatttctggcactgtctgggatgagctgtactatacctccagttaaccctagagtcttctggctccttcattgaattccagtttctaaatctgtgctcatgtgtttacccaactcaaagtagatagcttttctcaaatcaggaaaatgtatccctgaaaagtgaagtgttcctcggcaggtttggtcattactgaatcttccgtaagaaattctttaaaaatataatgagataatgactgtgaaagtgctttataaactataaagtgctcaacgcatgtaaaactgtgatattatcatcactcatgtcccctatgctgctaatcgtcagtggatcagccagggaggcaggcgttcctcgcttctgctttgttatactgtcttatcccgaccttgacactctggcagcagtgaccctcaacaagataacctgacagtcagcggtgtctcacccacactattacctgcctttgttagtagcactcagacagcatataggtaattccccatgtttcttgttcattgtctctgtaataaaacattttcttttatagaaatcctgactctaatttcacaaaagctctgctatggaacctcctctggcctctcccttcctcctgaaatacagtagtgtgtgtttcatatttgaactcacaagctaattgaactttattgaaagattcttttactttgcccaacatctttaaatagtgatttggtgctatgattagatacactctcaaaaactattgttgctgggtagagagaagcttcaaggaagaatgaaataaacaagcatgatggagttggatgggttagaacaagtttgtttttcttatgtggatatgcttttcatatccacatttattttgtttccttgtctgaactgcaaggtccttggggataggaataatgactgactcagactgttctggaaaaatggagtatgatggaggacatgagcaatacctataatattataaatgagagaaataaaatgataaggaattgctgaccaaatacagtaacactaaattgcagtgattaagagcatgaacttagagtttgaccaattatagctgtatgaccttggacaagttacttaacctttctaggtcacatctgtgatttggagataataagaatatttgcctcctaaggctgttgataacgaatgtaaagtgtttatagcagtgcctggaacataatacaggcaaaaatgttatctgttatcatcatcatcatcattattcttttatgaattcttccttgaagcttcacaaggcaagtacaggacaaatgaaaagaaataaagtttacacagcatgggataagaatatgagatttactatgccaaaagtggtatagacgggctaaggattaaaaactaataacaaatgcttctttttttttttttttttttttttgagatggagtttcgctcttgttgcccaggctggagtgcaatggcacgatcttggctcactgcaaccgctgcctcccgggttcaagcgattctcctgcctcagcctcctgagtagctgggattacaggtgcccaccaccatacccagctaattttttgtatttttagtagagacagggtttcaccatgttggccagtctggtcttgaactcctgatctcagaataaatgcttcttataggcattgttttaaaatgttacatgtgttgtctaatgtaatactcatgacactatgaggtagtcccattttatagacaaggagactgaggcactgagaagtgaagtaaccagcctaaattcccataactcataaagggttgagctaagatttgaatccaatcaacctctgcatttaatgcctatttgtgagtgagtgtgtgtggcagaaaggatccagagtagatgactggtgaaattagatgtttaggcaatgtcttcacatttaagatcattgtcaaggagaaaattttgaaatgtattttgtcatcagaaataatccagggacacgtagagccaaggcctgagccagagaagaggtatttatactttgattcaaggaacatgaaattaaccaggaaaaactgaaaagcaatttaatccttagactttataggagtaaccttgttgggtttggtggatgtgatggaaagaatgaagggcaggtattgagcacagctaggtatgattctctttttgccatcttccattttagtgaccttgagcaagctggttcagcttggggtaggggattttgtatccacagtagcagagtgaagaattatatggaatcacttttttgcacccttcagattctaaaacacaaacgtttttgcattgtctaccctgatactgaaaattattgatacccttgatttaacatttatattctatcttattttgtattttgcacattgatcattcatttattcagcccctgtttgtttggggtatgctttgagctcactgtgtgacttttttccttaattaaaattagtctgggagagaatgtatttgcctcctggaattctcagaattctagcaaggtgccctaaacatcataagcacacatcagcactgttcatattgattatcatggtacagtagtgtatcaaatgccacctgaagttgagtgctgcaaatatgagaaaacctccgtaaaatcagccctcaataacttttctagggaatgtgccttaaaaaaaaaggtactggactgtgtgctgagaaaactgtaaatatgagtaaaatgatccctgccttcaggaagtttaccaacaagggcacaagcaaccattgtagaattgcttgtggccttattgatatacaggctaaggattaaaaaattataatcccagggatgaaaagctttagcagttatttagtccaactctccacacacattgagtccccgttacaacagcccaccaaatggttgtctggcatcttcttgaacacttcagtggctgtgaactcaaactgctcattctgctcgtggtagaatgacaggctctcaatttttgtgtagaaggaagtgtcttgctgaagagcaaaggtcttttctaggctgaggaaaagccaaggaggtcatcttggagataaaaatctggaaagtggaagtatatgggaacagacctcaaaggtcctttgttggagcaaagttacagaagtacaaaagccaaggcacgtggtaggaacattaagtagtctagcttggtcatttggcagtgacaggttgagaatagggaacagtgaaattgttaaagatagactgggactataatttggaggaccttgagtgccctctacttctggggtacataacggccctattgaaaaccctaattctatatccaataggtggctcattgagtaaatcactgttagcagtcagatctgatgtgttccccaaatccacatcctttatactcacctggacaactaccattcccccaacccccccatcatccatgaattttcttcagttcaaagagacatggttaaagcaggaattatgaaaagggccctctgccggccttatttccatgtagatctattttatatgcataataaccctaaggggaagctgtgtcaatctgccttacctgacagacccctaaatcctcccaatgctgcctccactattggacatgtgccaagtggcttgcaacctcaaagagagaaagcatcctgattttttgtgtgtaggaaggtggggggcagtgataaacaggtcttggcctgttattgtcttcctgcatgataatgaacccatcactagcacaggaatttaatgcaatgatttttccaagaaccatccagccccattgtagccctgcctgaaaatgtaaatacaccctttctggggacagatttgcattttttggtgaaagaaatgcatatatatggcaaagatgcctctgtaattatagaaagtttatttctgtccccagatgtcagcaatcaaattccacataaatatattttgtgtaaatctgtcggcagctggtctccattcaggtttctggagatattagcctgtctttgagtttatgacaaagttaaaaattattcattaaactgacctgcagtatattcagtaactggaaaattgccttgcagttctatttggtttgtagatgtgatcacaagtaaatttttaacttaattaattggccgtttctgttgacaagaaatttatgtggtaataatttgctcgaaatagatgccgactgtaggaaatgagatatccatcataggcttgtgttccaccagctgcacagtggctattatgaaagtatttcagcctgcgtcgaccccagtgtttgtgcagtcaagattatatatacccacgatccatagcctgccagagaggcgctggtggaggtctatgataacaaagactttgtgatttatggcttgctgtgaaagcagagcttgatgagattaaacaatttcatagcacaagtgtttctcaagacctgatttgtagttgcaagctgatggtaaatcacatttatatatctgcaagcgtgctcagcagaggactgcaattacagtttaagacagctactttttatttaatttttatcctggttttgtctcttttatatccccttcgtctgcaaaccattcaccttcacaagtcctttcctggttagaaggccaaagattgaagtcaatgatgttcttcgtgtctttgtgccagcttcagagggaggtccggcagatttcagagccgtgcagactggttcaaactggctctgactggtgtgagctctttgttcaatttcatgtccaaacagaagtctgtttgctattttcccttggtgtgttgctgatacttaaacttcttggtatacagagggagaaagaggggtcttcatcatcctgggatatagggaactgtggagcacataatggaaaagggagatgaggactaaattcactttagaacctcaacttcaaggttgcagcatatcttagggtgtacagttagctcccctttaatgggaaatgtgaaattgtgtttccccacagatctgggaggaataaactctgcaatgagtttatttaaccagtttattgattatctactgtggccacatgtcttcactgagtactagtacagcagtatttgccctcaggcagtttgtaatctacatatggtgctaaaacataaaaataagattggaagcagcaagatcagtgatagccttacacgagtggtgcacctgttgttggaggtcagaaggaaagggagatagagttcttcccactggggaagcatgaaggagcatgaatgagacaagtgcttgagggacagatcggatttcaagtaaggggaagaggaagttctggaaatttcagtgatctgtactgaaggaggcctctaaaatactcaggtgtgagttcaagtccaggctgggtggccagtgattgaataattataataataacataataataacatcgattgaatgcttactatatacaacaaagagtgctatataggtattatctcattaatcctcataacaaccccagaaagggagtattattgtgatctccatttggggaacaggaaattgaggttcagagaggttaagtaatttgatcatgttcatccaggtgtttggttgagctggttcaaccaataccctggtgtatttcaccccacagcctgtgttctttgccactgtgtttcactgcttttctttttctttttaaatggagaggaggtctcactctattgcccaggctgatcttgaactccttggttcaagtgatctgccagcctcagcctcccaaacagttgggactacaggcatgcaccaccaccacacctttcttgttttactgctgttagacagagaatatgaatgtaattagggaggcaattccactgttctgcatcctggtcacatcttcaagagctcaggtcatttctttttccacgaaagtacctaaagtttgggatgttatttttggtctttgtgataggctgaataacaatcatccgaatatgtccatgtcctaattcttagaaactgggattaccttatatggcaaaagggactttgcaggtgtgattaaaaaatcataaattgtggaggttattctgcattatccaggtgggcctgaggtaagcacaacggttccgaagaggactcagggaagtcagagtcaggggagaaggagatgtgatgaagcaagcagagattggagcaatgtgcttttgaaaatggagccaggggtgcaagacagggaacacaggcagccactaggagctgggaaaggcaaggaaacgtgttctcccctcacctcaattttgcctctatagggcctttttcagacatctgacctccagaactctaagacaatgaacttgtgttgtttgaagctgctaagttcatgtgaacttgttacagcagcactgggaaactgattctgtcttgcaaattccaaccagcttgacagagagtttaaccctgattttgaaatcttgggttttttttgtattatttgtttaagatagggactgatatggtttgactgtgtcccacccaaatctcatcttgaattgtggctcccataatccccaggtgttgtggtagggacccagcgggaggtaattgaatcttgagggtggatttttcccatattgttctcatgatagtgaataactctcatgagatctgctggttttataaagggcagttcccctgcacatgctttcttgcctgccaccatgtaagacatgcctttgctcctccttcaccttccaccatgattgtgaggcctccccatccatgtggaaatgtgagtccatcaaacctctttttctttataaattacccagtctcaagtatgtctttgttagcagtatgagaatagataatacagggatgctttttgatttccatgtttccccattctcccctcttttgtagccataagggaagtgatcatgtctgtttcattcactcatgaatctctgatgcctagtatggtatatggtatgcagtaggcactcattaaatatttgttaaatgagtcaaggagattacttcatcctatttccaggatatagttggccaatctgtctggaattcagttttttccacaactcaaccagcaaatgtcatagcttgctctttatgaagtcacaaagggagtagtcaggcactctacttacagttgtctgcaaacttggatatctcagtggagggagggggcagtaaggccttaggaaagccgaggctggctgaagaatctctaataagtcaatgtgagtggctaattgtgctaaatattaaaaaaaaaaaaatagatgtaaccctttatcctgatagcaggaaggtaggagggtttaataaaaagcatattgtctctgagaccctcacatgttttcatgcccgcattggctttttgtcttttatgtgataggtaggtagggagtgttttctacctatgtattattccaggttttatgcccctgagggtcttttagctggagacttataggcatagtccactccactgagtacagatgttaaagttgccaatgaagctctttatgagggatggagacaggccagtatctttggcctggattctagagacctggtttgaaaatcctgggaaagctgagagcttcgtttctccctctagagtactagtgtattagcctcccaataaaagttaattgaatttaattttatgttttaagtgtgatgcattttaaagttctccccagtgctagagtccctcttgaaaaggcagtaaattcatattattaaactaccaaatgtaattcagctcaaataagcatattcggcaatctttattctggatatgtgggactgaccttgcgttgaggctaaatcatttcatcccagacaaagtctgtttggagttaattggggaagcagtgtgggtgtacagcaggtcactctgggctttttattctctttctggccctcattcaaagagtcgctgtagcatacattttctgatgccagttcttccattattttataaatatcaatatttgacacagtatggaaggtgaaaaagacaatgaagatcttcccgctggagattcttcattagatgccctactttaccatattttaaaatgggcagtttgtcaccgatgcattaaagggctgtaaggagtggagaaagcacattgggctggaaatcagatgacctggattctaacccctgcctgtccattaaccaacccggtgaccccgggcttttctagtcttggggccttcattgttccacatttttaaagtgagagggttgtgaaagaacagtggttttcaaactgcatttcaagaggtacgaatattttgtcactgtatcttagcagctctgctgagtgaccagagaggggatggggtgagcagcagttaaggatgagaccagctgatgggcttcaggctctcagactcccacccctttgtgcagagtagctcacttcaatagcaaaaatcaacccaccatggcctaggaaagcttcaaagattctgccaaacactttaggtgtctaagatatttggggcaatttctccctaaagtttgtcaaggcagatgttggatcaagcacaatgaattgagtcatccattcttttgggagtagaaataacttaaaggatttgtttattcagatttgctgatttgtccagagttttaatgtttttccaaatttgtttctccaaatcctagctttgccagcccataatgtcatagcagctctgcgcatcttgacatgggggatctatagtggtaaaagcaggctggcatcctcttctcaaatgtctagcactctctttactattattttatgtacctcaaactttattattatgtcctctattattaatggcagagacaatgatataattatttatgctggaactcatgcttttgaatttattggatagagatcttctgaaactagaagatataacatatactaaatgtcccctcttatccctaagggatttcttttatctgaaacctcctgtttcacttatctctacattttggtggtgaatctggttgtggcttcttctttatttgccatctgcctgccccactctcagcatacaggtggctgtggactatctttattcatgtaatcttagttttgtttctatctaaacatcccatttgtcaagggccagaccagatttcatccttataggaattcctgcccagccactctagattccacaaagatcctgttctgaattccttcagaacctaattgggaccaaaaatgctcctactgtataacacagtgtcttatactattcattattggtttatttttcttaatctaacttgactctaagcaatttgaggacagagatcctgcaattctttggtatcttctgtagtggtagatatttaacataataacaaaagtatttattataataaaataatatttatgccagcctgctcctgttaggaaaggcaatgcattcttagtgagtggaaataaggtgtgttttgtttggtccactttttaacattgtattcataaacactctctggcaacaccatcattaattcatttccaagaggaaaaaaagttcttgctaaaaataaaattctgttccataaactctgtaaaaagaccagcaaacaaacaagtctcctctggaggaaccacagccacaccaggcccttcagatctaataagaaccttaattccatttgaatatctttgttgtgctgcactacgtggtttgggattcattttgcattagagaaatgacaaagacccagaaaacaagcactgagtcaggactggtttcaaagagctcagcttcttcgtttaatttccagttcatttatttgagtactgtcaaaaaccaaaatttcaacatatttaggttaacaatataatggccttttattagtgattcatgaactaggcagcatcttaatctaaaaatagaagtgctttgttggaaatggaaaaaagtcagtttttgaaaaataacagatgctgatgaggttgtggaggaaagggaatgcttatacactgcttgtaaattagttcagccattgttgaaagcagttcggcaatttctgaaaaaacttaaaacagaattaccatttgacccaacaatcccattattgggtatatacctaaaggaatataaatcattctactataaaagacacatgcacgtgtgtgttcatctcagcacatttcataatagcaaagatatggaatggaacctaaatgcccatcaacagtagactggataaagaaaatgtggcacatacccactatggaatactatgcagccacaggcatgggcaaagatttcatggtgaagacgccaaaagcaattgaaacaaaagcaaaaattgacaaatgggatataattaaactaaagagcttcttcacagcaaaagaaactatcatcagagtgactccattttggtttggtctgttctgttggggcctagtgcaggagctcagtctaaaagcatggcttcccataaattttatttaacagtagaattcttcagtactactacaattctttttaaatgctatgaccagatttgcacctccaaccccaaacccctcaatgttagttactacaatataaggagaaactgtggtttccgtaggagaaaggaagagattcttggaaaattgcttgggatgtacaaagccagagccaatcagtcaatcagaaaacatgatggagggccagccccttgcaaatcaaatgaagccttgctctctgcccatgatgataaagattatgttacaagaacagtttcctccaataaagtagtagttatggaaacaaacaaacataaaagatatttaatatgttcattccacaagggtttattcaataatttaatgaatgaataatttattaatggtttgcccaaaccaagggcaaggacatattacagtggaaggtggaggtgggatgttggatttgcataagattagagaacattgatggtatctttctctaggaaggacaaacttggcctgtgtggtgctgaagcagatatttccagagccttcctcaatgagggggaaattcggagaaaagaaacaaaaagtggacttggactttactgaattgtttcccattcccaagtttttaatatgtacagacagaaaaatagacagtctctttttgacaccctaagttgtacctgccaaatcatcagagtggcagaattggcctctgagaatgtgaggtcgccttcttttatgactatttccaatgttatttttttcaacatctcctccttagtgtttgtaatgcagagaacacttaaagtgctccacagacatggagcatttccattaccctatgcagtattacaggaagtagtttataaggagttcaatattaggaagagttatctaataaaacgcattgtctaatctccctattacaggcgatatttggatagatcctggttaactatagtctggcattttcaggaatacatttatgtgtacggtgaggcattgggcttggtgtcttccaattccatacatgtagcaaaaacctggtggctgtttctcaaatgtgcctcataactgaccaggcaaaatggatcagtaattgtcctgatgaattgccctttaattaccctctttcaaaccaatccttttcgagcatctgatggtgccaggttattgacttcatgtctttaggtttggacactttttgggcaggattattccgaagaaccacgatcatctagaggaaaacagaggaagtttcactgttgattctgagagaagaattttgagggggagcatttacatcaggttctccaatgcctgcaaggcttctgcatttctagtcccaacaaattcttcaaaatttttaggacaagattaaattgtaaccactattaactgtgtgcctaggtccatattcatgcatacctatccctgcctactttggcagaatgagttaccagtgtatgtagcagaataaaacagacttttagggtatcctaaatactcccaaactttattgttacaatctctttaatgggccttatccttcaggtgagtcagctggtttaaagagttatgtaaggtacattagcccttaaacatatttcccaaaatgctcaattctgaaaggaatttatttccttgttaagactgagttgaaaagcatgggtctgcagcaagactgaattatttatattagtgatttcttatgacaatcttataagtaactgtacaatttaggtttattttctctttttttttttttttttttttttttgagacagagtctcactctgttgcccaggctggctggcgtgcagtggtgcgatttcagctcattgtaacctctgcctcctgggttcaggggattcttgtgcctcagcctccccagtagctgggattacaggcgtatgccaccacagctggctaattttatatttttagtagagacaggatttcaccatgttggccaggctggtctcgaactcttaaccttaggtgatccaccagcctcagccttccaaagtgctgggattacaggcctgagccactgccctcagactctgtcctctattccaatggtggtggttaggtggacatttctagagaaacctgtcttacttcttataaggaggtgctataccttcaaggtggagacataccttgcttatttagtatataatgaagagatgagagaccagttgactctgagaagtagtatgggtatgtgtgatgtgaaaaagagtcatgaactactttgctagtttcagatgtaaattaatgttgacctctaattaaaatctttcaatttatatataatagctcaaagaagagcgagtaccatgacactttagatgatggtttcaaaatgacgggttttgggagcacttttctttggtacttcagcctgatcctccaaaaaggaaacaaggatttatttttgctcaaggagcggtcaatgagtgttactgcaaaatgaatctgaagtttttctctgtcttaggagggatgcaacattcacaatttctacttgtctgtctgctgtcttcaccctccctcctccctgtctttcactgttgggtctcaaaataaataacacagacacttcatctttaacttcagataatcagagtcacaatcatctgggatattgtgatgaacaatgtacatttcatacacatgatgtcataataatttaaaatgtcatctcaatctatttatgatcttctaatgactgaaatgttttacaattgtgggggatattttataactgaagttttaatggctgaatcactaacacctggctgtctggaatgcttttctttctcctagttaggcatttaaatgcatttctggaaggcccaaggggtgggatgtgacatataagctcttaaaaggaggaaaattagttcttgataccttaatgatcagtcaggtgaacgtttgcatacttagcattaatgctcttaagtggaatagcttgattaagacccttggtaggattttttttttctttaaacatccttctatgtgagattacagagggaaatgctgctattatgcccatcccttaaaaaagatcttagatttttcttaagtgttttattttctaactctattgttttcactactttttagttttctatctttggtttctaagacaatcaagttacctctttattgagaatttagtgtatattttcattttgctgggctaatatgtatatacagattatatatacacccacacgtgcacacacacacacacacgtgcacacacacacacacacacacaaattcttgtccctggatgagcatacagttgcttaaagaagaccagacatatacacatgaaaatgtcagtgaaccatacaagtcaatgtataattaagcccatagcaggcccccggtggatgtttactaatgatgatagtggcactaaattatctggtgcaggccaagagaggtcagtacaaggttgcccagaggcctgcattaaacaatcactgagataaagatgcattttagttcctcctatctgtacaacatatattaatatatagccttccaatgcaacatcccacttaatttccatagtaatccactgaaggaattcgaggtgtatatccacagtttggcagaagggaaaataaaggcttagagccatcagatcacttgcacaaccaagctcacagagctgggtggtgacggagcagagcctggactccacatccttgggaccctagtctgcttttttaccccaccatgttgcttccagttcacagggtttctagcagagtctctttaggctaaattgttgccttgaatgggcaatttgcttgaaatgtagctggatgtgcagcatctttgctcatgttgtagccaggaatataatggcaaatctctgtatatttgtttccaatgaagattgactacactgatgaaataatgataggctttacttccatttttatcaactaatggtgtttctggtgacaagtccccatgatactactttatgactctttatgcacacgcttgtgtcgctcctgcattctagatagattgggctgatgttacacaggcctgctttgactgacaccagaaagccgtgtgacaattggcttgtagattggacagttaatatagagaagtgtcatactatcccaattgggcattaagatgccatagacatggctaaacagggtggctccatctgtgaacaaaaggccactctgaaatgtcagaaaccaaataactaggactgctgtgcttgcaaatttgcaaaatggggaaacagtgtgtgtatttaattatttatttatttatgatggattcttgctctgtcacccagtctgtaatgcagcagcacaatctcggctcggctcactgcaagctccacctcccgcctcccaggttcatgcaattctcttgcctcagcttcccaagtagctgggactacaggcatgtgccaccacacctggctaatttttgtgtttttagtaaagtcattgttttgccatgttggccaagctgtttttaaactcctggcctcaagtgatctgcccacctcggcctcccaaagtgctggaattacaggtctgacccaccatgcccagcctagtctgtgtgccttaatcattgtatatctttaggcaaatatgttatctctttagccccatgtctgtaaaacgagagggtaatgtttgccttatgatgctcatgtgttgattagactacccaaaatggtaattttgttgaaacatttagaaaaatgtgaagaagagtgatacaaatgatgtctcatgtttgcattgatgtcatttcagatttttgcttctaagtatcttcctagtggcatcatacaggtgatttggcctaggttggtagccatagtttagcttttacaaaagactaagagttcccataaacatgtggtttggttctttaagttcaagccttagggagataactatgaggagttaggggtctttgtaattagtcaaattaatgagccaaaggccacatgtggcagagttatctatgatttctgtaaacattataaaattctcatgttaccttatctcttatatataggattccagctgggctatgaaaaatggctcaaaccaccatctattcctcccatttatctctgagaaataactcaagacccttaaatctgtttactctctggtttgttgtaacattgtaatatttagcttcatgtcactcagtcataattaaacagttcacattcatattctccattattggatttagtagccattctttagccacagtgtgcacttggaggttgttttggtgcttgtttttaataatgctttcttgaacttctacagtaaatacactttcccactccactggataggagaggagttgacaagctgggtgttctgatattggctgtgctgatgtttgctcataaattcatccagcaatctcttgcggaaaatacgttctaaacttggtattaagtttttgggcctatgaccagagtgaactcattttgtgtgtgtgtgtttgtgttaatccttccaagagcaataggttcacttggatagttcttagtttctctttttaaatttcttgattaagctgagagagttcacactggaaactctttgctttgctgattgctccagacctaatacaagtagatcttcaggggaaaagcaacatggctcatctaagtatttacctttatactggtgaagtcatctcttggtgtctatcttcatatttcccaaagaacgtataaaacacatcttatttcctttcctaagtctgaggccttatccatatattttaacttcagacttgaatttgtccttgtccctgacctagtaaacatttttatcaagaacatgtaaggagctggaaaaaggccttttttattaactttcaaagtataaagttggagaggtcagaacattccacaggttttagatcatggttccaagtggtcccagcaagctaaaacactgcctgacacctatcagacaaaatttaataggattgtaagttagaagtcctagctttatattttcaaaaatctattattgaagtatgtgcttgaaaggtctggcttggcagtgtttcaaatcaaaggcattgggatattttatttgactgaggtttgatatataccagcgtagactatagcttgggaaggtattgccaacttggatgtgatggaggctttgggtcacattgtcttcttgggattcatacagttcacccatcatctagaggactaggttcaggtcagaggttcatgttttaggaaaaccagaaaaactaatggggatcttcaggagaggcactaggctgttgagtgttacggaaatatttggcatagaatagaggagattaagatggtacatagaacattatctcaaatagttgaaacattattgtggggatgaggatgtagcatttgtaaaggagaaacctaggactatggtttaatggtataaggagggaagttttggcacaatgtaagaagaaagttttattaaaggatcttattaaacaaaatgatattcttccttacaaagatgtgggtgctgattgttctggaagagctaagagcagagctggaagaccatttttgtaaggcattgtagaagagatgtctacgtctgtgtgggaagctggacaggtcaaccttgcaggatgcaaggactcatttgaattcaaattcattgttatactgagaatttcaaagtttgcctatacattttcagtcatttccttgtttgtattcaggttattatatagcattctcagttagaaatatcacatggtcactaaacctggataccaggcacagtttgagtttctaaaagttgaatgagctttcatggacactgctgccgccacctctttgggtgtgccctctgctttgcttttgtggtagtgtcacggacatgcactggctgattctagctctcctctctggtaacccttataaccaataagtgctaaaaggactatagtatccctattgcctttcactgccctctaactcttgcttaagctatctctgccccacctcctctagccctcttcagttccactttcagattctcccttgacccttcattttctccttgcaatggaaatcctaccattttttccaaggctcagctcaattccatttccttcctaaagtcacctctttgctaatcttcactcatgctaatcttcactcatccctttctttgggactgatacatctttggaattatctagcatagtgcttaattgttttcacattttcctgtctcttaattttatctcccaatctccatagtacgtaatttgggattagggactttgccttactgagtactgcatgaatacattttattgatttactgatttgattacaaatatgatcaccacacagaaccaactggctgaaaagaattgtgccctgactttggcttcatcagcacaaggtcaaaactaaccaatttatttaagtatctaaaggatagggcatcatgtgaattatattaactatcaaataagcctagtttgcttattatttagacattcttctaaaccctaataaccccttgtcatctctgttatgaggccaaggttgcacgtttagaataggtttctggaaggctaagctgcagagccataggcagatgtgctgccactcctgcaggcttattcacgaggtggagaaaaattctcttccaagtccctggcttcccattgcaaagtaaaatgatctctggtttagagctactcaaagggttaactttgactccttcaccaaacccaactatttaatgtttttaacggcataatgtgttaatagccatacagctgttgtttctcagcctcttcctttattgagttagacaccatttagtaggctgagttcaaattgtaaacaaattatttttgcatatggatcaatggaaatttaataaagtttattaaaacagtatattggaccaaggagtgctgttttctctcatggatataaaccaacctcattagaccaacccatagtaacagaattgcagggaagaaagtatttctggtcatttaaagattattttggttcaacagatggtgactagcatcagagtatagtttttcttgtttgttaattcatttgcatgaacatatttgatggatacctagtgatcccaacatgcttgattttagtgcctagtgtgctttctagcacatagcaggaagttgatagagttgtcacagaggggattgtgatctcaagtgcaaagaagtggcgtgagatgctgagagtcacacagctgttgatgggcagagccatggaagagcctggagctctgagctctcagtccagtgctcctatcactcacacaatggccctcccttgattcactgcctgtgaaatgtcttaaatgatccgcagataccttctgcctgttctcatggcaatcccagtttatgttgcaataaatgttatcttaatctcaattgattgatgagttcttaaaataacagcattaccaaagttcccactcacattgtaaatcgcaaatattccactctttggaaagcattcagggtggctaaccactatttcagatatggcttgggcagccccactcttgtaagaggtatctgaaggggcttttaccagaaggagctaaatggttatcagataacttagagtgggatacagggaatttgtagtaaaggcctagattccgcaacacaaatactgactgccctgtggatttgaagttaaagcagaagagaactaagatgggcctacttttttggccctgagtgacagcagttggcagaagcaaccctttggggtagtagaacaagcttggagttgttcattccagcttccttgtgtcagagtcactgttaagtaggaggtcgttctgttcgactctggttggaatcattctgtgtctgggggcctgtcgtttctgtcattcttcctggaaagtagaatcctaaatatgggcagctggtttggactgaaaccttggtgacttctgaaagttataacaaatggaagtcattatcaccattgcccccctttacctttgtgctacttgaggcagaaaatgatttccccctcccccggtttgttttggagtctttcatccagagagaaaaggattagcctatggctacaatagagctttcagggccttttggcgtgctgcaaatgtttacttatccaggtacaaataggtaaaagcacatagttaaagcttccagctgcaaggtcatttacctttttaaaatgcagccgcatgtgccgactgaagtcgagggcttgctggtatgagccattaactgcctgttgtacgtaacctctccttgtcttacacacagctgcgtgcgagctgctggtgccatgcagccagcccaccatgcatgccttgcgagcaacaaaagcagtttaacttgtgatcactgatcatatgatccacttacagggtgcaggctcagtcaagtagaactggtaaatcattaaaaatgcgccttgatgctatgcctgctgagtaaaacatcatgctaacatctctgcctcccacccccaaccagttagcagcatagggaaggagctggtaccagctgcatattggagaaatccagttggctgagctggacgtggtgagagattgtcagctgcttccaagcagcattggagaggaaggcaggaagacagaaataatctggagtggctgccatcctctctccttgtcctttacttactcattaactgagcctgtgcaaagggccttctgtgtcaggcctggtactagtgcctaaattacaaaggtaggagaggaaatgaactctgacttagagactctcaaagtctgtcaagaactcagtcaccaccaagtactttcacataggcacccatgacgtgccgtgcaaccctaagaggcctggggtagccaaagagatgatgcttaagctgaaccttgaagagtgaatagaatttcatcaaggaagcatgtagttaaaggaacaacatgggctgtgccttaaaaagttactttctagaattctttcttccatgaagcataccattctactcagtttcttataggttttaacaaattgttttgtgactgtatgatggaaggtccaatggatcctctcttctctccatcatgtgggtctaattgtttctggcatcatgttactcagctatataaacccttctgggatgggactgtatctcttcagtattcttgattttccttacagctccaaaaacttggggagtgggtattgttggttggccaccttcttccattttcttgattagaaatattttctttgacttattttccttagaaaataagaaattattaaattagaaattagttgctttcacttttaactaaggcaatgagacagaacataccagatagatgttcctcctgcatatacgtcaggaacatctgctgttagagaagagccgtgtgtgtgtgtgtgtgtgtgtgtgtgtgtgtgcatgcacgcacgcgcaatatgttttaagtatattgtgtgtgtccatatgttctgggatattgaggtttctcaggagtcctgcagtttgcatggctgatacaacctttaaaaatgacttggacttccagaggctctggagagtaggtttaataaaatgttcattcctttagatgtgagactatgccattttactttatctagatacaccactgtcttccagttaatcatagcccttaaataccttcttttgcttctcaaaaggttttacctggacccagaagttcatacagaagctaaactttgggaagaggtcagatgtggaatccgtgctcccttccctttttatacttgctctgctctgcttgtacaatgaatggtcagttagaatgcctttgaaccaccccccttcctttctttttttttttttttatgggactcattcctgcaaggacagttgtttcctgcagaataactttctcattcctctcaggactactgcctgggggccaaaacttgctaattagagggttggaggaatcttcgcaatctgctgtcttcattttcaacaccagtaagagctaacctttggctggttgtaggaatgaatgagttttgtcctctagaaagatgtccgtcttcattgtacaaagaaatggaggcctgagactcaagctttgtaggattaagattcagataaaatcggacaatttgctcagctttctgctttacatctttgtaaaggaaataatacttcctcatacctcccctaacttcaacccaatctctaaagaaatgagagaaactctaaatctgttctaaaactaggggtagtcatggcataataggtatgaaagatctgttcttatctcttccttgtataggggcagatatatagtggcagaattgagaataaaccaaacaattgagtgttttcagtagaaactgatatatgactaaccatgtacctatgaacatatttgattggtggtatttaaagagttgtaaatatttctcattaaaaatagactgtgagatctgtagtcatcaaaggtgggattgccacttgtggaggtagaactttgttttatttgaaatcaagaaaagttgtgcagctacatttggggacactctgggttgttggcacaaaatttaaactcaggctatcaggaaattcctcagtgggaaggcatttcacaaagtcgagatattatccattgatcatggtaggaaagcaggcaagaaagctgtgttctatcctgggcaagccatcaatgcctggggaaggccctttatttccgtctctgtgttctcatctgtctaatagagaagttaatacctttccaacatacttcacatgtgaaaatcagacagtgtaacaggttctctgtctttctctcctggaacagatgaaatctcttccatcattcagacgctaggctgttttgtttggactctcttctatgggcatttgccccaatccctttttctatggtagttattgacttatctcatttcctcctacaacagtgtaagttaccttaatttgcaacagtttactcctctcaacatggtgcaaagagcacagcacttgcatcaggaagccctaggaatatagaatcagaatggaattctgtgatggaatccaggcacttggtttccccaagaataccattgtaggattgttctatctgccccaccatcttgtttttgggagttaaacaggagggcttatgggaacatgccaagtacatagtacatgcttagtaaccattaggctccttcccttagttctttgctcatagtggcaacttaatatatgcttttggaccaatcaaattttgacaatgaggaggaaatccatgctatttgttttttttccttctggttaagatgttcaggagagaaatagccctgccctcagttatattaaaaatttaaaaaattaccatttcaattgttgatacaaagtatttttgaggtctgcagaagacacaatgcaaattttattaagttaccattatccttgtcagtgaaattagagcatgtttctaatcagtatcttcagcaattacagacaacaaggaaataactcatgctgttatatgaaacagcttataaatttttacatacatgtgagaggaatcacttggaatccaaagctgccaagaggaataattaggaaccacagaacagatcttggtaatgtgacagcagcttctaaaacatcccacaggacgaagaagcgcaagctggcttgacctatatctttaataatacagatcattgcccttggattgaggctaaagggtaggaccaagtgcttgcttcatcacgttttaggaaaaattgccaaagtatatttatgaattcaccacacaatggcctcttgctttgattatgaactgacggatctctctaagtagcaactcagcatgcaaaatttaaaacaaaaaaacccaccacagagcataatttcttatattctgtcatgcttggcaaaaagtattatgtaagacccaagtagacaaatggctgttaacagtagaaataaccttttgtttaattagaaaataggagctatatgggataataaaaatggttactgatgccctctgtcactgtttaataaatacgatcgcgctagagataatgggaagtgttatttatttgtgcaatatcacagacttggtaattgttcatgttgttgagcattttcctgtgtggagatcacagtagttttagaatttgtttcctttgatctaagaaaaggaaatagcaagttgtttgcttaaaatgttcatggcctccctaggctggagtaaagtatctgcatatttttagcccctcagttttgaggacagaatctctgtggcgttgtctgatgcatattgagaactggtgcgttattttgaactggctctattttttttttccagagcgccctcaggtgctcatggaacatacttctcagcaatgccatttcatgttcagttcagattttccagcacaactaaatttagtagccttgctggagggaggaagtggagcagagctacctacctgaggatgtgttcatgggaagagaaaaatctccctgttgctccatcttgagaaccagcatatgggatgaagatcagactgaatttccacagcatgtgtttcactatcttccctggggggtggtaaggagaaaaggctgaaggtgttggccatgtttcagggtcacttccattttgtgtttactgtgaacactttagttgtgagactgtgccatgtatttggggtcatctggctagatttatttcattgcacatggcagttcacgcttggtttcttttttttggggggtggtggtggggattctgttttcttttgtattgtgattgctggagtggatactcttgtttcttgccttttagagaaaatgtttgtggtttgtgatattggatgatttatttcttattatggcaacctaaggatttttcactgttgactttggtgattgtgagatatttcctcagaccctgaactaacacttgattcttctcatacagagaaatccacaaaaatgagatatggcacaaatttgtatagaagtgttttgtgtgaccacttatttctgcaagtcctaagtagccctttctagaaggtttccatgtaatacctttataaaaatatagacagtttgttaaaaggaaaacacaacgcaacaaaaccccttttcttcacacaattcattttaagcttcaaaatccctgaaaatccccaatctccttttgcagtctggttcccactctaactttcctcatctccccctgaaagaaagaaaaaagcatttcttccagggactgataagttgtaggccgatgcttagcaacagcattcctgtgctttaagtagctgcaagccccttgctgaactctttgatgtgactgtcagggcagatttattttgttttagcacattgtctacttgtccagatgtatcaggagataaaaaggagtcatgtttacactcctcccttttttttttttttttttggagatgtaattaaatcgtgtttttgatgagtcttggggagctccagttgaagaaaacaggaattggctggagtaaagggaagaatgaaaacttgcttggcagaatgaacacctgactgcgtcaaaaaataaagcataagtaccagctggcgtggttctgtgaagctggaggttttgttctgagtcttttgttccacttctgtggaagtccaaccaagaagaagggagaggtgcccgtccagcgctcacttgctgggcactatctgtgaaacctctagctctcagtgatctcttctttcttactgcacacaggcgcgcacatgaggccttaactcccttcttccactatcatttagtgggtagtacatctgtgatagatagttgtcaatctaagctaataaaattgttgaactccagtgatcttgaataaacaaatcttcaccgagctggatgagttgaattccctgggaatgggattgccactctttttttttttttttggtgatcagttttttaatgtgcacatttagtaacaccattctgagttctattaatgacctgcagtgagcagtgacaagcaggaatatgacattcagtactgctgaggacctgccaggcagcggctaacacgctcgctttcatctgcagctcgggagacactctatttgcatcctaaataggttacactacagcacccccttctgccgactgagctgtgtgacaagaaggcctcactacaactcagttttctcccctgatgacagccctgaaggccctttcacggctttctctaacctttctagccttcccctttggtccctggaggagcacaacagtgactaatggtgtgcgtacctgcactcctgggggcttcatttggattatacttttaattactcattcatcagaggaaaggaacaaaaaccatccattgaaggagacagaaagatgggtataacaaaaagaaagctgagccaagcaggtgctaccttagatcactcctggctggggtccctcctgccagatcccaaatcccagacagacgccactgaatgcatcttagaaactacaggcttggttttgtgtttcccatttgtagcccagtctgaagtacaggaaggaggttttcctttgtttgttctaaacaccttttggatgactccatttggcagaagcgcaccttaaacttgtagtcctttcacatacgagaaatcaactgggctctgctagaaaggggtgtccacatggggaattttggagggaggaactatgcatgccacctgtccaacactgagaagccctgtttgcaggggttggggtatggggtagagagctcccatcagaggacagtgcagaggctgacttagcctgggaagatgtggacttattgttatcctccacccttggaggccagggaatgctatttgttcaatattttaagttcatttaatttaccatttagtatttatcgagaagatactatgggccacccaggtggagtagggcgctgccctcaaggagcaaagtgtctagtagggggacaactcaggcaaagcatgttgggagggagttaggaaggaagactaggctttgcaaagatctccagcaggatggggcacagtgccctgcgggagcaggagaacaccacgtgatgactctcagggtgaggagtgaaggcaaaagagaggctgagaaggcaggggctggggcagagggccttctaggaaatggatggtgctctttgcttaccccaagagcaaggtgaatcactacgtttttaagcagagaggccccagtttccttgtgaatcttcgtggagtcctttgagctctgtaaccatctgggttacaggtcttctttgtgtgtctcactaccatgccttacccttctgtaatctgtctgtgcaagtgcacttgcaggataaacccaggagctggagaaagcagaggagtttctgtggccgtgtttacctttcaaaacctaggaatcctggatatggaataagagaaaagagggcttgtagcatgtgtgggccctttcttgggccctttctatcttataattggtacaaaagacagtagatggtagaacggagtcaggaaaaatgttggaaaatgttttaatggatgaaaactcatttggaaagtaacctcaaaacatcttttttctttttcttttctccctcccttcctctttctttctttcatggtcaggacattggactgtcctgagcaaaacatatacctagaatgggatctcccacccagggtaggttcatgcatactttgtcagtgactgagtccctctagaccacaatgtgtttgagagttgaagactaagatgggcacagggtagtgtttctttagaaaataaacttaaattttgcatttcctttggcttcagggagaataaggctgctagaatggttagaaatattgcacaggacatcagacttactgattatgatacttgattagtcatttttcttgtagtaatcatatatttgggtctggaatctctcaaggaaatagcttcacacatatgtatacgtttagatgaatgaaacttttgatgttaacagttattgatagtataaagcaaataaaaaaggcctctttcaagaacggctctgtgaataatttacagaaaattttgaaaaaagaaaataaaggagaaaagatttttgggggttatttctcaaatgactttccatctattaaactattttccaccatttcccttggctccaatctactatattaactatattttataataaacacattagtattgtgaaaattaatatttaataatgtagagtccttatctagaaaagttaagttcttatctagaaaggtacacaggctgaggattagtattaactttacaaagaaagattgggtttggaactcagagtttttttatatccttatcctctcctctgcaatcaacacatacacacatacttttgcatactgcagcccttttggaattccaaatgttagcatccaagcttcatggttcttcttcagattttagctatcctgatatagacactgagagcatgtgggctctagcccagaagagttttagcagcctagcagagcatttgtacatatccccctttggttgctatagtgggtgctgttgaattgctaagcagagaatcctgcctactttctttgggtctcttgggggaaatgaaactcaagtgtagcagctagtcctaagtctgtaggtcttcagttccacatcctaagtcacacatgacacggggcatggatcttcaggggcttacctaagctgtccaggacacattgtcctcatcctcaacacaatgaacctggaggcttggatatattcaaggcaaacatccttggcatctcttttagaaataggcctgaaagataaagagggccgagtgatagagtaatggggaaatgcttttggaaaatgagagatgcacattagaattaattttcccatacctttgaggtttgcatatgtcaaaattaaaactttttagactgttgttcccagaggacttcctcgtgctactcttttgtactggtcacatattctcttgtggtattatctgtttaatgtgtggacaaaatgtgtatgatgtctcattcccagaattgataccagtagttgcttgacacatgctaattagtaattaaatatactgtattactcctcacttaaacagaacataccacactgagtttaactttatcctgttgacatatatatgtgtggaggagtggaggaagcctggggtgtcatcatttcagaggtctgttgcagcatcttgtggttcagctcttagtctagctttttgtggttgtttctttttccatgtcatactgtgaccccagcagctacccttgcccacccctcatgttgctctatttagatgcctgtggctgtttttaatcttctgtgggataccaaagcttagaagaataaaattgtatgataaacctgcctgatgtcaactaagatcctgaaaggtataaactttatgatatctgcaagacctcgtggggagggttttctggaggtggaggccttttgttgatgttgatgtcaggattgagccactgcataatgagttcagtttggcctaaagataatgatgagatgttttgaatgtctgggatgcagtgaggggctcctgaagacttacacaggaggtcgtctgctttcgaaggggaatttgcccttttggcctctttggtgtccactacactgtattctgggatagacctaactctgtggaaccaccatgtgaccacccttaatcaatagtggtctgatggggccagctgctctctcagcactaggagtggcacaggagccaggctcaatcaggtagagggttctttctcatgggtgaggagattctttccaggataggcacataacccaaagcaggccacggattcccagattttgttggaacttacaggaaagagaaactctttcttttgtctttgaagatggtgaggtacagatgtggggggctcctgggaggccaccacgtggagaaaccaagaaacaaagctgagatagaaatttctgatgagaagtttgaacacctggatctaaccgtatatgaaaccatataccttgagctcattaaagccccctgctcctctttttaaacttaaagcactttgaggtggatttcatgacttaccatcaaaaggataatcttattttcctgaactgttcaacaagggagattctacaacttaccctggaaatgtagcaagtggtccccatagagtcattttggtcaagaattcttaattgtgtgtgacttaaatttcattttctgacagtctctctgtaatgtaaataacaaaccaaccctacttgccctctccccaaatcaaaaaatcctcaaacccaggaacaaaattttgattagtctactccttccaaagacaccttcatctacttgaacatcaattttcaatggtcccttcaaccttctctttaaatactgtctttattatgcaactttgaaatgatctacctgtagatatgtatggcaagtgtcaacactagtgagccatgagaatttgtcatagcagcgatctcacaagcatatcttgaaggttttcctgtggtttcatcctggcatctggtcctgaaagacgaagatggatagggagccacatggtggctgttcactggccccaggaaaggccgtgcttgtttcccctcccaagactacttccatggaccgagacaggtaactgcagttacccagtgactggaggagatggagaagattccagtagaaccagccaatctaaacccaggtccttctctgtgaagtcacctttgctacacatcagagaccatggggctgctgctttctcaccaatctctctcctgctctcacctctctcctcccagcctggggatggagaagccatagcaagcacccatatggctcacattttcttctcctcaaaacctctccccatagttctgtctgaatctgaaagtgacggctccaattaagacacaggaagaaaagaaatataatttctaagtcacttggcctggtgacatatatgttgggagttaggaaagtcagtgtgcggcttctctaccatcccaggcgctgcagtcaaacaaatcaattcagccttcagaggggcatccattgccttgtgattatgtttgtgtaaagtcttggggtctttgatcaaagaatggcatttcaggccagtccctaatcctcactgccttaagatgtttaaatgggttaaaaaaaaaaaagttgataacagctgggatttaaatttgcctttgcccagcttttgttttgaaaggacttctattatccgtggcttcccttttcgaggcaaagatggatcattgggtaaaccaaaaagggaaagaggatatgggaggaaatgggcggggactctgaattaatcttctgaggaagaatgtttgatcagcggggaggaggggatgaaaacctctgatgctgacagcaggcacctttctgatgagggtgtgattggcacctttgaagcttcagtcaggagccagtgtccagtgggtcagagcttcctctgtctgtgggtggtggaggtaataatgaggcaactggaaggattaattgcggacaagcagcaggattacgaggagggcttctcagctccaaaaggaacagttcgaggaaagcctctgatctgtcagccttagaggaaattagtgggagcagactcgagcaggcttaaaaaaaggcatttaggatattaaagcgaaatgtgaagaggatattaaaatagggcaaaagggcaaggagcgctgatcttgaaaggcgggtgtctccctcttattactaggaatttccaagttttgcccagatttcacagacaccttatttttacagtccagcagagagattttacttgcattgcaacaagttaggggagggtcagactggatttgaggtggcacccaaggtcctgtacaaaacttgtttgctgtccaccctctggcagtttcagaagctcctgaaactaaggctcctggtataattttacaacaagccagcgcattactgacatcctatctgcattagctatctgttgtatgttttacttcttacccttctggttcaagtctggatgctgccaataaatcctgtgttaccattaaagaggccattcatcacgcttcctaatgcgattaatcaagatacaccacagtacccttaaaatgagatcattttgataaatcatgtatgacatgaaaagactttattccttttaagtgcaatttagactgtaatttttttcctcatttatgattcatgggagaaacatggataaaattcccttgcacagttacaccttatctacagcaataactcaaaactgcttttagatgaaaattcagggtcttattcaccaaagctgaatgccagctcattattttctggcgttcagtagtccaaaaataatgtccgcacattaagcggcattctcaaaaaagttggaattggccaggctccaggcacatcaattacactccatcatccttaataaggaagaaatatcagatgtcctcttggaggttttttgaatcagtaatgctcagcctttaccttcccaatttagaatgattgggaaacaaaaatggtagtaacaaaaaaagtatgggaatttcagggcctttacatgactcttctcctgttgcataagtctcaaaagaggtattttttccctcccatgcggttcatgcttccttttccattccccttttctcatttcacaaaggaaactaccattttgttaggtctgagttttgtttctaagctgctgtatctgtgatgcaggctttcccctcacagctgtcacaataatttgggaaacgatattcataacctccaatagaaaaataatttgaaaatgtgccttctggtgagatccatcaagtttaaggccatatttttggttaaaagggagacactgatgctattcattaaactgaaaaatggcttgttttccactaatattgaaataaactctggatgaatgttaagtcatgctggcatgcactcttattgaaagcaaaaggaaaacacagatatatttaatttggacatgtaaagtcaacagagttttaggtctttcatgagaaagggaatcaggaagattggctgaaacaaatgtgaacaattagaagttcatttgcctcttgcaaagagtgagagcatttaaagagggattcagtgtctgagaactatagactcacttgcatttttttttcaacccctggtacctatgaataaagaaataaagacttgatcaacatgtaatttatttccctgctgttcttagagattcatttgggaagcagaacaaaagccagtatttgactctgtttttaagtaacccaagaatgcacacgtatcctattcatgcccacttaacataaatgcagcaaaactcaagtttatttgggttatcacatttatgctaatgctctgtactttaatcggatagaaactgacataaaacaaaagttccttgcatattattcacacatttaaatgaaatttcctgtgcttttaattttttctaatatgaagagtcaattaagaatctaaggccattaaggctgcacttgccttgtttaggtttccatttcacatttatgactttctatttttgtgaaaaaagatctgtaaatttgaaaaatatgcacgtatctcattaaaaaagtttcccagctctagcaacactcagcaaatctccaaagaatgcaagtttaaaacataaatattttaaggccccataaaattggcagtaaatatttttccccctttaataccatgttcatttcattccaatttactaccacgattatattttccaaagcggcttttaatacaatacacaattatttcatatggggttgggtaggtcgcctcattaagcctgcaaagatcaggcctcttgtgatccccacaaatatacttgcatttactcctaattaaaatggccctcttaaattgtctcaagttcattaatataaataagaagctaagcaaaatagccacagttgaacagttagcagggcaagatgaccaggtccccaaacctcacacagagcagactgtggtatgtatgcagtggtgccctgccacctgttggctctgcttacacataacagggtattgatgtccctcatggtggtgcagtaaccctctctgacccctatccctagttcatcatccccaagagaaaagaagaggcctttgagaatcccaggcctcctgatttcccccatcattcatttccttggctacatgtttctcctgctaatgctaaaaatttatggctgagcacattaagggcagtgcgagtccttccctacttctggattatatcagagtttcctgtcataaggaaatccaagatgtgtcctcagctgattgcatgtgacagtgtctgcttatatctcaggaatctgaggcatgatggataaactgtcagttttgaaggatgatattttctccatatttccattatgaactgggctgtcatctcctaataaatttcttgcattggtatcaatttatttttacaagcagagggtctgatgtatttgggaaaggcactgacagcagatctggcctagcctgacagagctggcttcaactcattttggaaaagtactttggttccaaggacagaacttgacccgtagccctcaagattaaaaaaaacctccgtgagaggaaaagagacacatgaggcaagttccttcttttaagccaaaataaatcaagcccttaggactaccatgacataatatcatttttaagacagtcctacaaacccagttgagatatgccacgtgtagccttctcgtctgagttagatgagaccatctaaatgttgttagagcatcacaataatgcagtgaattgatggatgaattcggattataatgaagctagggatctcacaatttttgctcccagaagggatctcagtagtgctcttctgcttgacaagtgagaagcaaaattaattcatataatgcctatttaattatgaaatatgggcatgtctctgtcatggctactgtgaagggcagaaaaagctatacaacatgagctttacctctcaagaaacttaaagtccagttgaagagataagatattaaacaaaattagagtgaagtaagaataaatcatagctaacatccatgagcagtggctaagatggttgtttcttacccttatttaacatttacctttattgggaagggaggcagcataacattgtaattgccaagacagcagcaactggaggcaaactgcctggatttgtgtcccagctctgccaaggagtagttacccaagaacttaagtgagagctttgtcaggggacttaatttctctggtcctcggcttcctcatctgtaaaacagaactaggagttgtgactcctcgtgaaactttgtgaagattgaataaatcaatacatggaaagtgtttaacgcagttctcgacacaaagtaagtactaattaaaaatgctaataaacgttagcatttttaaactatcattatcatgattgtgactattattaccattatcactgttagtcaaaatgtggcttaaagagtttaagtcaattgcccaagatggagcctggctctaaatcttgatcaataaggcatcagagcacagaaaacagagagttaaacaatatacaaattgtgaattagtcaagaacagaatccttgaagcttagttatttttcttactgttctttccattcctagactataaaatagccctttctccattgcctgaaacatactttagaagctagttgaaaagtgttatatgtagtggtgtgtaggtaaatgcttaacagccaagtctctgggaaaaaaagtgtgtgtgtatacacatgcatatataatatattgcattttttagttatataaatgatgtgtagaacacaattaaaagtaaataacaattgaatatataatactgtttctaaaaaattccatacaatcacttaattgtcacagatactttcaatgattttggccaaactcttgtatctcgtatctgtggttgcaactgatgaacaactgtagttcccacttgatattcctttatcttaatgagtatgtcagaactttactcatttgttaatgacataagaaactactttgctgaactggataatagtttttgaatattggaagaatattttttcaatttttttgtgctattcacaatgccttgcaatacccaacaaagcaacttctcaaagaattaagaaaagattattaaatgagaaggaatatactaataccacaggtaatttttataaaggcagaacatcctatctataaataagcaattatatttagccaaagaggtatggagcacaagttaatattttgctaccattaggctacgacacaacatcctttttttgttgttgtttttaagaaatggaattttgccatgttgctcatggttggtctccaactcctgggctcaagtgatctgcctaccttggcctcccaaagtactaggattacaggtgtgagccatcgtgcccagtcacacaacattcttttaggttctatctgcaacattaacattttctccatcactttaagtttagcaaataagcacaccaatgaatcaagctctcacttgcagcatttgccagtttctgctgcaaatactcccacagtggccaatgtcaaactacaaagtgccatcactgaagagttggaaagtgactgcacatcattatatagtatttttatcatacaaattcagtagactcaatttcaagagcataaataacagtaaaattttgtaaaataattaagaagtgaggagtcttgttaaataaggtaatttattcaagtttaagtgtatataattttaaataatacctgtgtttaacaactgaccaaagttgctgaaaccttaataattacttcttgtaagccagtacaggttaacacttacacaccactggttatttgaacccaaaaggccaaagagatctgaaacactaatttgtctacatcgcacagctaattctttcatgtattattaaataagttgatagttttatttacttagcacgccacaaaacgtgttgcatattaccatgagttgattcatatctcactaccaatatattacctacctttgtatgtgcactaaataagcctaggagggttttctttgccaggcacctttgaacatcaagttcattgtacagtgcttaggattcaggctatggaatcgagctgtgttatttctcaattccggtctccacatactagctgggttttcttggactagtactataacctctctctaaatctcaactgccttacctataaagtggtaatgttaatggtacttgtgatggcagcggcggcctgtctggagcagccgcttcgaagattagcttcagtggggcaggaagggctggtgggagccaggaacagacaagagccccaccccctaaccagttgaaggggcgggagcccgcactccttggtgcagctgcagcttcccagccgcactctggaccctggcatccctgtgctctcaggggcctgggaagcccctgccccagcgggcttggaagtgcctgctcctgctcccgggcctctccctgctcccggtgcccactccagtgcagagcaaagttgtggccaagcccgagggctgtcgtgactcagctgcgtttgcgtgcactcagggcagcactcacacgctagcgccccctgctgccttggccccctccagactttgggcgtcagtgagcgcaggaagcagcagcccagggggtgctgagggcagctccctgcgggcctgtagacacccctcaacgtgaacagcctgggcaacgtggaaggcagacaggtccctgggcggaagggggtgggtgcccagtgaaaccccaccttcaagccagggatggcttgaagcctgggggccgggctgccagtgccgggtggagtccccctcctggagtgagaatttatgatgctttttccggctggcccatggcagcccatggaccaatcagcactcacttcctccctttgagcccatagacaccctccccactccaatgacctgcctgcagaaaggagctacatacacactgtgggtcttctgagagctattctgttgctcagtgaagctcctccctgccttgctcaccttccagttgtccacgtacctcattcttcctggatgcaggacaggaactcaagatccgccaatggccagactaaaagagatttaacacaaacagggctgaaacacgcctctccgcctaacacgttgcaggtaatgagaaggagaagagctgtggcccttcagggagcccagacctaggggctctccaagtcagggctgtgacgccctctttagggctctgtggttcctggcgtctcccagcttccaggcaccacagcattccctggtgcccatggtggaagctacttgcaggacgcctggtccagatgcagcctctcttggagccagcgcctatactggcacttggagctgcctgccccaccgcagccagcacacctggccgtgcgctgtggccgaaccccgtgctcactcacacaccccttgccactccatgcctggctcacccttgacagatgtgggatctgggccggtagtgccagctgagcgcagcctgctgggccaagtgtgtggaatgagcccagtgaggctaagcaaaactcaggcaaaggcgccacgggccacagacatttctgactagaaaactgacaccctaaggatcctgtgacacttgcattataaggctattgagagggttaaatgaaacaatgtttataaaatgcctgcatataattaatgccagaaatgtgatgtacacacacccacattacttggaggttatattacattacattctgattatgttctatgtttgaatatatgacacaaactaaatcttcagcaagaattaattagcagcaaactattaatttgtgctccatcatacttctttggataaagataattatttgtttgtagataggatattctgcccttattaaaactacccatgctattagtaaattccttctcatttgataatcttgtctcaatgctttgagaagttgtcctgttaggtgctgcaaggcattcactgtcaaattaggactggcccctaccatcttgcaaaagagacaggtgcccagtggacagtgaagcaggggagaatagagtaatggtcaggagaagggcatcatgaaaacctgagggctccaatgcagagagagtgtggggctacggaaacagtttgggctttaggagtcaggctgatttggtttctaatcacactctggactttagaactggatagccttgtacatgttactgatctttcctaagtgtcagtttttttcatttttcaaatgagaggaatataggacatatctcatacattggataaccattagcgtttaccatatattcaagaaatattaaatcctgtcacacactttgcctcctttctttaccatctccttctttttcctcaactcgtatttttcctcccttttttcatctctcctcaacctctgataggacagattgaaaaatatttgatggactaggcattatttcgtatcagccattgtatatgagtagtgttttaaattctaaatattgtaaattataagaagtaattatatgttaaataaagtttacaactccaaacatccttaatcacattgctagcaaaaatttattgatttagtttttgagatggagtctctctctgtcacccaggctggagtgcagtggcacattctcagctcactgcaacctctgcctcccgggttcaggcaattctcctgtcttagcctaccaagtaactggaactacaggtgcccgccaccacacccagctaatttttgtacttttagtagagacaaggtttcaccatattggtcaggtggatctcagactcctgacctcaggtgatccacctgcctcagcctcccaaagtgctgggattacggatgtgagctactgtgcctggcccaaaaatctttctatctttacttattaactactacttattcctaattttatgtagttaaaaaccacaacctatgtattattttaatgtttaccatgttgacttaatgctaggtaattaatatctttgcatatttctctctcctttgtacttacagttgtattaggttaccaaaagaaattatgatcacttctataatgtccaatatttagatggttttatttttgtcttctgttatataagtgtctgctaaaaatattttggaaccactgctctagatgatttgtaagatctttaacaactcttacattctgtgattgaattagttatgtaatagcccataaaatgcccaagccacagcccttccttccttttttcctttcgtagttctcctcctccctccctccttttctttttccttccctgcctttcataaatatttgtgaactgctactctgggccagatgccactgtgggcactggcagaactgggccccctgtagatcagatagaaacaaatgggaagctctgggccattgccttcaaaaggctttcttattccagagaggtttttgacataatcctcccctccccaccagcctctgctgtgaccagcttcttacttgaattacccttcagctccctcgctcagcttcatgctcagcatttgcccagactctgacctcttctccattgggatctttttcttggtctcttggttccagactcaccctcatccctaccttgccttttgttttcctcccaatttcttggcttctggctctagacaggatatggctgttcctgctttcaaacctgtctattattcccaacttaatctgtctgtcagtgacaccttctctcttgctttactgaaaggcatggcaccttaatctgtgagaggggtgggaagcttcagccttctacctggttctttagtttctctaacttaatccttcagaagatggcaagtctttacttttggattctggcaatgtggcccacactttcgtgttgaattacagtcatggtatgtagttttttttttgtttgtttgagacagagtctggctctgtcgcccaggctggagtggagtggcacgatctcggctcactgcaagctccgcctcctgggctcacgccattctcctgccttagcctccagaatagctgggactacaggcacccgccaccatgcctggagaagtttttgtatttttagtggagacagggtttcaccatgttaaccaggatggtctcgatctcctgacctcgtgatccacccgtctcggcctcccaaagtgctgggattacaggcgtgagccactgcgcccagcccatggtatgtagttttatctttgactttaaaatgttttacccatcctattatcatgaattgacttcttcctgtattttttggcagtatgttgagcacaagggttaattgtataattaatttcagaaagttaatatagttaatctccaaagctctctgttagtatgagtgagaaatgagtaagggcgtaactactgttataggtgtttagatgtcataatcaaagtcagggacaacattctgtaatgatccagagtatgggagtgtgagggacacactatgagttggtggctcttcataaccactattaatcatagtatgtttttttttatgacccagcaatgcaaccaatgttctcattttatttttcttggtattcttagcacagggcctggcatatagtaggtggttattaaatacttgataactaaatgagtgatgctttttcttatgagagaaaataaatgtttttagaagagtcagctttataccatggtttcaggggatgaattgtgatgaaaagtgaagattgcttttgcttgaaagaggctgactatttcccagacccaggatcactttctgtggtgtatgatttaagggtgagcgagcatgccaaagcgctccacttgagctgagtgatggggaatgagttgtagagctgtggtcttagatggtattttgtgaaaaacagtgggagatttatggctattaaacaactttgtagctgcccccttcttgtttcgaagtctgccaaatctctcctcctgtggtctgtatcaggttctttcagtgcatccaggacattcagagatatccaccggactgtagtttttcattgaatgcacctattggaaaggggcttgaattttatgcatttatcagttttggtaatcaccgagtgaaattctcgctttgcacgtctgttgtagaatacactgtatgtgcattgaatcttttccaagcgggttgccaaagttctaccttccttctttccattatggatattgcagagtgcagtatattagtggctactgcctttattgatgtgagttttaaaaattattagtaactctttgatcgtgagcaggagaagaatcaagtaaccttcagaatgctttgatgtatcttcagcagaaggatttataaggccagaatgagtgtttcaagccttgcgggggaaggggatacatatttaccatcatctgcttttttctattctagagctcactctcagtagctctagaagaaacagaaatgggatatttcatcacaaaaagtcaatcagaggtggcattcatccatgttatacaagtactagagaattgttacaggaatttttctctcattgtgggttcatgtcaatataggagtgcatggattagaaaagaaatagggccttttggtgtttttaaaaaaatttcaggcttaagtctgagaaattccaaaatgtagaaaacttttaaaaataatgaacacatgtagagatcatccagaatttgtggtttctaatattttgacatttgttttaagtcttctttaaatgaaagaaagaacatcatatatacagctgaagttcctttctctccacatcacactagccccagtcctactacactgccccttggcagaagcaaacattttcatgaatttagtgtacattttaaaataatttttaggtgtttccctgcatacatgaaatcaacaaattttatatttccataaatattatattacatttatcattttgcaacttgcattttcactctgtattaaatttttagacctattcaaagcaagatatagaaatcaggtttttttctcttaaatactaaatattattctgtcttactgatatacaacattatttttatttattttcctcatcgacagacatttgagttaattccaatttcttctgttataaataatgctgcaataaacattgttttatgtctcaatttgcagacctgtgtgagattttccgtagagtatatattttaagtgaaattgctgcaccaattttcaattttattagagattgctaagttactctttaaagtagttgaacgaatgtacattcccaccagcaaggaatgagaagacaacagtttctttttcctttgttctcactagtacctgctattgtgagacttaaaagtttgtcagtatgatgagtggaaaaatcgtatcttgttttaatttgcattgcccttagtcctagtaaatttcagcaacttctcttatgtttattgactgttcaggttttctcatctttgaatttccagacatttcctttgtctatttttctattgatttaaagacattctttttttttttttaaatttggatactaataatttattgtagatgttgcaaatatttcctgacaggagaatttaaaaagtaaaatgtaaaactataattccttgccataggcatttagaaaatgtggcaagagccaggcgcggtggctcatgcctgtaatcccagcccttttggaggtcgaggcaggtggatcacctgaggccaggagttggagaccagcctgggcaacatggcaaaaccccatctctactaaaaatgcaaaaattagctggatatgatggcacgtgcctgtaatcccagctactcgggaggctgaggcatgagaattgcttgaaccagggaggcagcggttgcagtgagttgagatcgtgccactgtattccagcctgggcaagagagtgagattctgtctcaacaacaacaacaacacatttgccaaggattcaaagatttaagagtctttatagtcttgaagattcatatttactcaaatttgcttattctcattttaggcatatcttcttaacccaggtaaaagaaaacattatttaaattttctattactgcatactcaatatacgatgggtgtactgcctcagtttcaaggcaagttctttattctttggcagatacagtataaatttaagacattttcttgtccacttctttcctatgataattgtgtctttctgaattgtacatctaatcctaaggttcagagaaccagtgtgaacatcactgttgaaaggatcacaagggcttcattttgaaaaaagccaagtcaaagagctggtagttggatcattgatttgtagttgttttcctaaacatccagccatagaagtcccaccaaaaggcatagtttgcaaaatcattctttcctggattattttccatgatgtgagtttatcaatggacactgagcaggaaagtaattaagtgctggtcatagaatgatgactgcaaaacaacagaagccacaccattttttgctctacctacagtacgaaacaaaactaaatatctcttttacgcttggttacagaattctaatgtgtagcacagtcagagatgtttctgaaaaggtagcatttgttccagtaattgtagaaaaaagctgtcatcaaattgtcaacagcccaaattgagattaaaagttctaagaaatatcactacacaacaaactaaaactcatgttggatttttgggtcttttttttagcaatgagatggagcagaaatattgacagctatggcttcctatggaggaagtatgatagatctagggaggatgacccctgtaccctcaccccatatgtcctgcctcaagcattaaatagatgccctatttaggacactatcctcatgtttcattcatcaggtagaaattacaggagaccttgaatacccaatagagagacacttggtgactgtagtatttgatttttaataattttgggctctacattcttgcagtgtgctaaaaagtggaaaagtcttacctactttaaaacacgtttttcttggtggttaagcttttatttttgtggacccaatagccttggatccaaatttaaacaccatatatttgccttggagctggagtgaagaaatgctacctgaaaactgttttctacctagggacagagcttctgattttgctccactcacactcttcctgtaagtctccactgaaagccgcttagtcaaacgtctcaaatgtcagaaatgaaatttaaagggtttttctagcaagtaggtctaatctcctacttagttttgattcctataatataggtaatctctttggagaaaaggcctgcttttagaagggcaaatatatcccatagaatgtatttcccgctccggaaagaaaaatgtagcattaatgaaatttactttttcatgaagcttggaaagattgttagcttcggattttgatcctagcagatgttctttttgggatattaaaaaaaaaagctacatttgatttaggaatctcagttaagagttacagcggtaatgcttcttgctactagcagctacactgtgagtgtggcatactggccattggttctgagtgatagctgaccccaagctgaagtactttcttttggctttagctcacaaggatgttgggttctgaaaagagagccttagcagcctgggccatcttggacacagttctatggttaaagagttgtctgcgtacagtgaaaaagcatcatcctagatgtatgttatgttattttcttttaggccttggagtgacacatttgttgataaccactacatcccaaatccaaatttcagacgtatttctcactgctgttgttaaactgagccagaatccccagtacacagcacaagacaatttatatcctttcctatggtgacttcattctgccaagtctttcatgccactgggctcatggaagtcagccctggttttccccatttatcctgggggcagagcttaacctcttcactagtatccaaagaaatctgctcatagccagcctttactttgtgggaattactgggtgaaggcctgatagaaatctaagcctttaacttttcctgtcttctgcctctctctttttcctcctccctcctttcatttcagcacataaactgcccccttttcttagagctattccatatgtactgaggcccctcaaagctttggatcttacccaacacttaccagaatattatctcaacaaaaacagctcttgcttcctaagaagtatcttggtgaataatattttctccaagctcagatcccaaggagacaggtctggtaaatgagggtatttggtatttggtgtttggtgttgcttcatgttgactttgcttttgtcacacaggcttctagtgaggacgttgccagctccccggagcgccactacacgcccttgccttctgcttccagggaactcaccagtcaccaaggttggaactcagctttttattgctctcagtgggtgcagggagggacacttggctgtgcagagctctggctcattactgctgcctcggcactttagaaagaacacagtgctttttaagtccttgatgagaaaaccatacctgtcacacgtagtgattttaacccatattaaacagaatttagtagcagtctattcaggaggcaaataaatctacggtataatataattttgtgatttttttttctttaaataaagagattagagtacttaaaaattatcaaggagatgttaactccagtattagtgatggagagaaattgggaaactcactaacatttataaaagtatcgttgtttgagaatataacaattaacagctataatttcaaaatgaatgaactctatgttataactaaaaggaattccaatttgcctggcaacattgagagaagccatgtgcagtttttgctgaattctcttattttcaaaatattaatttggtttactcagtttttccaaagccttgcatgtctgttgccatctctagagtcttcagcttcaaaagcagacagaacactgacatgaaatatcatttgaaaatgtcttatccctaagttggctgttttaaatattgtttccccaagaaggaaattccacttgtacacgtaaaggtgaaagtgaacaggggctattctagcattgtcatcccagcagcattgcaggatgagcaggtggaagaacaggctgtggtgatgctcagaaagtagtgaatctgaccctccaagtcaccgtctgggctctgggcaaatgggatacttgtattctgcaggaaacgaagaagagagtagtgcaggatttccgatgtctgtggcttggacctgtgttgcctgtttggtgtttgggcatcaatagaacttttctacatttaaatatactttagttaattttgtgaaaaatcaattttgctcaaagtcagggagaataagcagctgccaacctgctatgttttgaggggcatgaacaggtctctttcactgaatgtccttttgaaggtcttaagcatacatccctttcgagactgtttttgggggaatttccctaaaataacaccacatctagatggagcaacaaattaacccttaaattagcctcatatcctcatgtgtttatttattggtttcttgtatttgaataagggtatttttactttagagtcattgaataagttgcatagaaactgaagtctcagaaacctcacagccacttgtaaagtttatctggccctgaaattgagatttcactatggagagatatgatcagatagatgataatcattaggaatagggcaaatatcatctgtcatttttaacagtaatataaaaaatctgagacttgaagaaaggaaatataacacaatatagttttaaaatatttggagtaatatttggaatatggaaaaatgcctaaagtagttagagttcaaataagtgctcttggatgacatcagggcttaacatcaatgagagaaatgtaaagacgttatttaaagagagccaacacagacatctcaattttactgaagaaaatccctacacatttaacatgttggttgcctgaccagtgctgacttggttgttgataaaagcaagtccatatcataaaatgacgttctttgggctgatggccataaggagaccaatagagagaagaccgaagaagttcattaaagctggattattgaactgatctatgtaggagaaaggtgagactaatatatttcagcttagcataaaccaatttggcttgaaccaacttggctttccccaagtgagaaagccattattttttggcactaaaatgaaaccacttaatactatctcatttttttagtatttaaaagaattatttcaagtttctgatcatgtacatcacgaaaacatttgaatgtcatttgttaataccttcatgcaaacagcttacaaacatttatgcagaaggggacatttcatggtgtgaggacaaattacatcaattctttctcaagtgaaattctccatgatgtctgaaacttttgtctatacaatcctcagtggaagttctatttgcaaataattttttattcatcgagttcccaatctcttttccttccacaccaacaactacaaaaactggcgggcagtagttcatgtgcaaattgctatttttctgtacatgccattttccctttacttgtccttttatgtaacttccaatgtcaactatgataggtccaagattcatgtcctaaaaactgtagattcaaatgcaaaggaagtccgggcttagaataatgatcaggagacctgggactcaatttttccatctgttgcttgtagataatccatatatcacagggatagtaacatgtcgtattttgcttcctgcatgaaacttttactgatctgagttatgttgattttcttctttctataggtatgtctgatatttgtttctatcttctaggtgcaattgttcatattctactttgtatgatagaggtcaggttatgtgtatcttaaactcctcataaatgaaaactccctgagaggcagcagtaagtccaaatcatctttttttttttttttttgagatggagcctcaccctgtcacccaggctggagtgcaatggcacaatcttagctcactgcaacctccgcctcctgggttcaagcgattctcctgcctcagcctcctgagtagctgggattacaggtgtgtgccaccatgcctggctaattttttgtatctttagtagagacagggtttcaccatgttgaccaggctggtctcgaactcctgaccttgtgattcacctgcctcggcctcccaaagtgctgggactacaggtgtgagccaccacgcccagcctcatcttctctttgacatcagtgacactgcccattcttcaggtatcagcttacatatcacagctccaaaggaaacttgcctgataccccctacacacttatattaggccagtgttccctgttcagggattatcttcctagaaaggccataagctgttgggaagagtggttgtgattacatatgttcaccactttatctgcaatgcctggcacagggcctcctacctaaatggcgctccacatatatttgttcagtaaaggctgagtaataggaacccaggggaagggtgagtatcttagtcacctctgcgaggtaacttgattgcatgtgagaaaggagaccctgcttcctttgggggtgaacacactaaagggaaaggtccagctgtgtggacctcagacctcaattctgttgctttcataaacccaaaccatcagggatgggtgtcatatgtgttcattcattaccagaaagcatttagtcacaaagcctaacttctagatagttgattattttaatgttgtagttttcaagcattggcggtttgacggtagggaagggaataggatgaattgaagtaactgatggaattattttactagaacagaaactctcaaggaaggggtcagactctcagtaagatacagattgtggtacacacatggatttagaatggtccacctgaattctttctgagaatgctgccctgggttggagcatatctttggaatgaggaggacatgggaatgtgtcagtaatctcagttgttccctcgtggcaatctacatattgtatccttggctgtgtccatgttatgaggagcgctaaaatatctgttggagaaatgtccctttaaatatattacgagtacaggacatgccccagcgtgccaggtattgccgttctttatctggtagctcttagaagtagaattcacatttgtacagggcattatgtcttttggggaaaacatttctatttagaatgtaaactatatcatcctcagggtaaccctgtaaagtgaggagtgcaaatatttttcccatttaacagagggagacatcaagaattgctggggatgatggagcaactcaacaacaggcaagggaaacaaaatcaaagccctgtgcccttaattctcaggtccccctgacctttgtcctttacccagtgcgtatgaagcaagtgtaggtaggactaactgtggccttgagctggaaggaagagtcaaaaaagtagagggagaggcatggcctggaaatgttcaccactgccatgcgtttccaaagcctgtgctaaggctgctaggagctacagcatcccacttgcctgcctctgtcaaaagaattgcattactcctgccctgccattctgtatttttaaattacagaacaataaaatcaggagtggagaaaatttgaaaacaaaaagggtgaatgctccatgtcagtctggattcagacagggaaaatagaaggcactgtatgtattccagtaatgaagagttttaatggaaggaattagaggtgctgccaccacccagagtcacaacctcagcactgaaccagtgattctcaggagcttgctggaaagtttctgtggatcacaggaacatctgggtgtctcccactgactttctctatctgaagcaccagtgaggggattctcacgttcacctggagactgtttcagtcattgctgttatccatgcgttgccctgctcctccatctctctagatttccaaatcatactccagcatctctctttggcccaactctaacctaggctgattcactgaaggcgattctccgatgtagttttcagttctccctcgaagctacagagaaaaccttagaagaaagcagatggtggtaatggtaaaacagataatccagcacatctaccataaccctgccttgccaatagctatcatgtggaggatctcatttcaacttgtctgcacgcacattttgcaagataattgcaagcctagtgaatgtccctgaattatttatttcctgatgcttatactatagtcttgaagatatgccatagttagcttgccatattaaacattgaacttgaaatgtgtaaaagaaagaaagcaaaaagaaaaaaaatgaagaggaaatttgctgtgaaacttgcttagagatgataacctttctactttgactattgttggcaatcttgccattatttttattgacacagttgttaggtactcatcttcctctccaaccaggggcttggtctatttgtgtttgaaattgattgctgggactgtcacaaagtaatttatatagcaacttattataattagttatcatttgcagtttcctaaatgtgagttgcattttatgcttagcaattgatttttctgtatatctccatgaagcagctcaatgtatgccatccaaaaaagaagaaaaagaccgaaagaaaaactgtgtttttttaaattatttaaaacatttttagcctgagatatcataaaatacgtttccacagaagacataaatacagagtgttttgcttcaactcattaaatcgccaaagtgaaagtgaataaaaggaaatttaaatgtctgtatgtgaagaggtagcaatgtagacaaaaatgtttgggatggggagatgttggccagaaaaacttcatgccaacaagcataatgctttcaggagggctcaaaaggaagttacttgatgactaaactattgctcacaatttgttttgggcttataggattcggaggtgcaggggcagaatgatgcgatacttttcctcatctattataagggtcacagcccataacaaaagacaggttaacaagagaagaggataagaaatttacttaatcaaagttttctgagatgggggggcctttagaaatgaaagggaaaactagttttatgcttatgttgatgaagaatggacagctgtgtagaaacatggttagacaaagggtatgatctaatgggaatagattgaggggaaacctagcaaggcctgtctgttcagattcttcttggcctctctatgtagcattccttcccctggttataggacagaaccctctgaaatgagagtcttcaaaggagaagagagagtgtgaattttctaggttttatggctggctttaagggataggattctagtttcgatgaccccacttagggaagaggaattctggtttctataactcactgcagggcagagacagagggatgagggagcaggtaagagaaggccagagagaccttgcttctgaggcccttccagtgtcttttgtttcaaagcactcagcacgtcaaggtgccacaatttcgggtattgtgttttgagccctgtcagaggcagtatgtctcttttagccaacttttagtttttcatttttagatttctactatcttttcatgtcagccacagggaatgtgaaagctaagtaggtctgatcattataaacaaaatctacagaaaacaatagcaaagactcaggaaaatagatgcatttatttaggccagcttaatagcttagcatcaaggaatcttttgcctactgcctcttggttatcactgaccatttataaacatgaggccaggtgccgtggctcacgcctgtaatcccagcactttgggaggctgatgcaggtggatcacttgaggtcaggagttcgagaccagcctggccaacatgatgaaaccccatctctactaacaatacaaaaattagttgggtgcagtggcaggcacctgtaatcctagctacttgggaggcagagacaggagaattgcttgaacccaggaggcgaaggttgcagtgagtggagatcgtgccactgcactccagcctgggcgaccaagtgagagtccgtctcaaacaaaacaagcaaactaacaaaaagatgggatgaacaacctgatggttctggagcctttgccacataggtctcacctaaggtcaggccctatgagtgagacagcctgcttatatattgccttctgccttccagaatatttttattagtctttcaagagagctaagcatcaaataatttctcaaaaaattgtcaatgactcattgaaagttcatagaagcacaacagatccaaatttctcctgtggataatgtattgaaaagtggcaaaaggaaagagagagaaaagaaaaaagaaaaaaacctccttagagacaagaatatgtttttgtccaggggtcctgtcaaataagagtatggccttggcttgtatcttttagacttcttgccaccactgtgccttgactgtgtgggggaagagtgtgttggttcctcgtgcagaactattattagcatttgctaattatgtaaaatgatttcctctgatgacattttcaacagaacccattactttagttttctttccttcataatgcttttatgggcttataatcttggtggaattctcagatgctgagagatgctaaagtttcctttatttaatcgaggtgactagtgatttgacagtagtggttgacaggtttattttatctgcgtggcagtaggagtctattttcagtgtgtgcactctgttccaaagtaaaaggactttactaagtgctgaataaattgtactttcctttgattctagaccttgctgaaatggtttaaaaactccggtctgggtcatcaaattcatctccttgctactttgcagggtcaatagcttcactctgtacagagccgggctgggtggattggaatggagggtagtgtagattaaaacttccgcatatatatagatagatgtgcatgtgtgcactcgctgtctgcgagggtggcagtgatggaagagcaagccaagtggaattgaagatggatgaatctgttagactattaccaagactggcatggagtttagccaggaactttaagcaacctcctttaaacatttgaaatccataggggtccatttcctctccttttcctccaaggatgatttttcatttgcagtctctgagattgctttatttctattctttgggcagaattgtggtatacttgtagacagagaagggctacgaatctggtttttctctcccagagcaaagcaaggaggaaaaaatggatttcagttttcccctgcccctcaaatagtagcaaaccctacttctgtaaaatgagaggtcagaatgacaactcttcccccaacagacagtcccaataaaaaatgatagtaaaaacatgctccctttatcttaacaaaatggaagcctagaatgtacagggtggaaggttctaaatgtgcttatgttttagagtcctgggctgtttcttgcccctttttataaagaaaaaagtatgatatggtcagtaagacaaagattgctatgagcacagtcattcaagaatctccccaacatgtcttcatttagtacctattgtgtactgagtgtattgttaggatttgtggagaattcagaaatagagaatattatctctatcttctaggaatttatggtttgattgaggagatcccaaaaatgaagtaataccaaccaaacaatatattatatattacataaataagagctctattagttggtaaaagctgcaaatgctctcaacgtttagaaaagatagcgtgcaatgtaggtgagactactcaggcatgactctttggaggatgttggcactgagctttgaagaacatgttaagtggagagcaaaagaagggcattccagaaagataaatgggtaaagataaagcacaaggacaagaacaggtagaactgatgagagaaagggaccctgttttgaaaaggtcagaaataaggttccttatgtaggataggtccacattatggcaggccttggacagacagaagggtttatattttatttaaaaccatgctgtaggattattaatctgcaagcagtatccaggggtaattggaaaggagagagcctggattcaaggaggccatggtgggatgggattggaaggaaattgtttcagtcttagaagccttagatttccagataaccaggttctgtgcccatagactgtgatgcctccaaagagcaggtttctagcaaaggtaatttagaaaacaacttggtaacagatggggaagacagctggggcctggatagatactgccaggagagcaggagtgggggccatgcacagggaaccttatggccactatggagttgttgtatgaggttgctgatggtttggtcacgagggctcaggcatcagagaaactggacagtcagtgtttttcctccgcatgttattcagaatatttctgatgttggcttttgaaactaaaacacagggcccaggataatgttacaataatccagcattcgatgatcaaggcctggagtggctggctggctgactgggagtacaaaaaataaaggaaggaatatgagaaacattctgttgcaaacacaatagaccgaatactgattatatttcagggtagagagaaacagaggaccagaaagctataaggaagccagcatggtgtgtgggaggctgtggtctctgcctgttgcccctctgtcggttcatcctcatcacaggattctctcccaccattcatgcatgaactctaatctggcctgttaaatggaagaccggtggagttaatgtagtggagctgtggcagcaggaacaaacgtacaaaaagcaggcagagcagccacaaacatttgttctcattctagcctttggcttaaagatgagcttcattctcttaagaactaataaatgtccagggtgttttatttctgaatcttgggctcctggaaggagagtgatttgaagccaatgcttttggtctaaattgttcagccgtgagctcggcccagtattaacttcctagtcccagttcttctgactctttttatttccctgtctcttgtagaaaactttacccctgccccaggtttttcctcatgtagtgattttacaaccttttttggaacaaataaacaaacatctggaatcatgtggcacatttaattaaaaagtttgcatttggccagaaatggtaaaatcatgaaaaatggcctgtcggtgagctcaagaaggccaaatgatgacgttgttggctgcaaacggactgaaattgagggaagtgaacacctgctcagctcggcctgccgtcctccagcttcctcctccagccattaatatttacagcagtttctttatccattctaatgaaattttttggttggggctggtctggggagagggctgttacttttccaataaccttggatttgttgtgatgtgtgtactttataaagggtgtggtattgggctttttgggcttttcatttcccttgctcagaattccatatgcttcaggtcactgcaggggcctgttgctgtttcttcaatcagtcactcaaccatggttttcatgagagccgtaacatgtggaaccctgcaccagggcatgtaggagatgaaaaagaagctgtgggctctgccttcaggaatcctacagtctaattggagacaaggtcctatgcagagaaagcagaggccaagctagatggaagagtgcagagaagggagggatctgtgatgatagaaagattgggaggtggccttggatgaaggtgagaactgagttgaaagaactttccctgcgtgagttccaagtgtgaaaggatttaggaagagatcaagttgtggattcttgtctagtttctggtcataatctaggtgaaagtagggggtggatcatttaaagcaagaattagatatgattattctacatttccagttagcttctcctttgcaagacatagctagggtgaagtaaaatttaagttttgtttgcaaattaggataaaacattaagatgatctggctttgcagagtgtagtgctctcatatgtctcccacatgaggatttataccgaggatgagattattcttaggacaaagtgagaagtttttcttgttgcacagaatacaagggaagtagccaggtgctgcaaatatagtaagcactgtttaggttagatccaaaggaagtatgaacccataggtatctgagacatgtctcacaataaatttagaaagtttattttgcaaagacttaaggatgcgcctgtgacacagcctcaggaggtcctaatgacatgtgcccaaggtggtctgggtatggcatggttttatacattttaggaagacatgagacatcaatcaaatacatgtaagatatacattggtttggtccagaaaggcagataactttaagtggggggagcttccaggttataggtagatttaaaatttttctgattggcaattggttgaaagagttgtcaatagaaaggaacagctgggtgatataagaggttgtagaaaccaaggcattatcatgcagatgaagcctacaggtagcaggcttcagagagaatagattgtaaatatttcttatcagacttaaggtctatgttgatgttaaatgctggttggcttttcctgaattccaacagggaggagggcataatgaggcatgtccaacccacccccgactttccatcatagcctgaatcagtttttcaggttaactttggagtgccctggccaacaggagggagtctattaagatagttgagggaggcttagaattttatttttggtttacagaaggatgagtattgttttgaactagggtgtggattggcaagggagatagagaaatcaccattccccaaggccttttactgaaggacatgctcatctctctttgaggtagcctgaaggaagtgaaatgaaacttaaacaattttcaaatcctgactggatgtaatcctgggttctctatgtcagtgctggttcagctttttcataaaatgaaatcagggtttcaccttgaccctcctggacttgtgcaagcacagggagatacaggatcatgctggacggagcataacttcagttgccagaggagttcttagtcctcagctctttattattcttgtgcatctgtttccttaaatactctctgcagaagcattagcatgaaaataaaagagtacagcaacttggaattttccatttgtagcttccttagtctgtggggtcaaagttctgtcctcagggatgctaatgcaaactctgtgtgctgttccagggcaaatgtttctcaactaaatgacaagagggggtggggagccagggaaataatgcagtgctaattcccaaacacagactgcccagaggtcccaatttaaattgctgcttccccaactctattcccaccctcccccaaaggaaaaaaaaatatcctgtgttgttaggacagacatctgtgtgagagcaataaaacagtcttctcccttgtggattagctctttattcctttatttatcttgctatacctcatcagtttatcctaaatcaaggagagtcaaagaggataagatgcagtcccttttttgtttttgattaaggaaacccatacaaccatcctcctacacaaatttcttttctcaagagatagctttccttgttatgtctaatttctccccacccccctttttttaatctgcctccttggaaactctctggaacttttatttcatataatgttcaaatcagaaaatgaaactcctccagagacaggttagatagggcagtgaatgttggcatgtctgcatgattctaaagtacaaggggaactaggatagcagacttaacatattccatagcctccatttcttcttccaaatccctggaagtttattaattcattcaagagatatctatagagcatgttctatgtgtcaagccctgttcaaaacattagagatagagctgtgcataaagtgggcaaacatttctgccttcaaagagcttatgttctagtcagagagaggatctataactaagataaaaataaaaccaccacatggtatatcggtactaagatgaaaacgacagcagatcaagggcatgagagagtatgtgttggcaatttaagatctgacagccagagaagtcaccactgagaagatgatggtggagtaaagacctggggaggtgaggcatggaaccctgagaatgtctgagagaaaagtggtccaggctgaggaaggagcaagtgcaaggccctgaggtgggagcgtgctcctggcatacatgaagcacaaccaagaggtcagtgtggctggagttagtaatctagggggagagtggtagatgaagccagaacaataccaggggctagaacttgtagcccattgttaaatgttaaacccaggagcattaaaattttaaagaatttatttgagcagatggtgattcatgaatcaggcagcactagattgcacgtggttcagggctccaccaagagggtgtgagggaatattttttataaggtgtttgtggaagccaagacaaagaaattatttgattggttaaagtggaaagtcccagttagaagttagttagtggtttcttgttggttaagcttaagtttcattttactgcttacattgacttgggttttggtttgcttatgtaggaatccaaagtgctggaaccatctcagcctaatggcttcctgatagattattttaacactgtttactgtgactaagacaggaagctatttcaaggcagaagaaataatagaaatgctgttacccttctccttatagaaaaaaaaaaaaacaattcccaaatgaataactaactggaaaagaaagaaagggtactgcttttgatcagaaactatagatttcctgcaagatcacagcccaaaacaaatgcaacagagtttcaaaatgcagaaccaagacccagcagggtggcatatacctacaagctcagatatacctgacgtaggaggactgcttgaatccaggagtttgagactgtagtgttgagtgattgagcctgtgaatagccattgtattccagccggggcagcatagtgagacacagtctcataaataaataaataaataaataaataaataaataataaataaatggatgtagaactagcttcaggagttctctaagcacagagaaagctactgggggcctcatagcaggcaataatttgggcttcctcagtgggtacagccacatgggtcacattgtctgtatacttctctccatccttagtttaggcatcaagtaacagagctatctctaagccagggcagtaagtatgagtgattggatcagaaaaataagatggcaagagttggtacaaatgtattaagtcataataaatgagaatgaactagactaaaagacagagcactaccagatttggttaaaaaaaaatgtaaaataaaatactttttcaagaggtgcatgtaataaaatgacatagaaaacttgaaaatactggaattaaaggacagaaatactggatacctgctaacacaaaatccaggaagagcaatgttaatattagacaaaataagactcaagatgattactgaaatgacaaagagggttattttgtataactatgaagatataatgggaatctaaaacaatcatgaatcttaatgtacccaatgacatggctttgaaattcataaagcagaaacttctagaaataccagaaaaaactaacaaagtcaccatcatgaagactttagcacatctcctatgaaaatgacagctaaatgaatggactttttacaataccttccttttgttacatggaaaataaggtgatattctttaaaaacctgtatgaaacagtcacaaattggctcatatccacaaactggctcataaagaaaagtgtaacatgcttctttcaaattaactgaccataactaagtcaaattagaaattatattaaaaaaggaagacttccttccccctccttccaaaaaaaaaaaaaaaagtaaaagaggtaagaaaaagaactatagactacagaattagaaataaatgaagttttgggtttatgaggaaatagtatacagtatactttaagagtaaatggaagtgataacactgtagtatattaaaaactgtgggatataccaaaagtctaattaaaggatttttcctccttagaaacataaactgtaaaacaaggaatagaagataaaaatatatgaactatgttttcatatatcctaattaaaaaaccaagcaaacctaatgacacatggaaggacttaataaaataaaaacaatgtacaatatactttatcaacaataccaacagatatttaagaaaaaggtgagcctagcagatcaaagtaagaaaaaatagagattgacatttaacattaggaataatgagacaaaaaaaaccccacaaagctattgagcttcatattgataaatctgaaaatctaagtaaaacaagtaattttaaggcaattatagttaccagtgctgtctcaagaagaaatataagtctaaacagagaaaaaaataagatgataaaagaaactttaaaaataaccatatagccctcaaagagaagtagcatctcatcttttataatttattccagaaaataaaaaatatggaaaattactctttttctcttactaggaatccataactgaccctaagcaatgtgagaaaacatgaaaatgaaactctaggtcagtctctttttcaaatatgaataaaggaatcctccatgagaaattaacaataagacttagtaatgcatttaaaaaatagtacttcctgaccaagtagggtttatctcaatattgaaaggttagtttacttttagaatttatcagtaaatgtgtcatattggcatattaaaaaagaaaatgggattatatataaggatgatgttactagttataaaaagagagggaggccaggcatggtggctcacgcctgtaaccccaacactttcggaggccaagcagggtggattgtttgagctcaggagtttgagatcggcctggccaatatggcaaaaccttgtctctactaaaaatacaaaaaatagctgggcatggtgatgcatgcctgtagtcccagctacttgggaggctgaggcatgaggctctctggagcccaggaggcggaggttgcagtgagccaagatcgtgtcactgcactccagactaggtgacagagtgagaacctgtatcaaaaaaaaaaaaaaaaaaaaaagagagagagagggagaaacctatgaaatttaacaaccatttctgctaaaatctctcagtaaacacagaatagataggaacttccctaacttgataaagtgtatctaccagaaacctatagcaacctgcatatgaaagagggatttaaaaaatttccatcaaagtctcagaacaagcagagaaggactattctacattcccttggatgtgctagccaaagcaatgagatatacaacaacaacacagagcgcaataaagattggggtaaattcagcattatttgcagtcaatattatgacttagaccaggagtaggcaaactttttctgttaaggagcagataataagtattttagggattgtaggccagaagacatctgtgacaattactcagttttgccctaataacataacagaactaagatccattatatctgtagtaaaatatataaatatgcttaattcatgtattttaaagattttcagagtgaattataaggcaaaacctaatgctctgtgttgtggaagagaaacagaaacaaactgactcaggaaagttaaaataaaaggatggacaaatgtgaataaaaagaaagcaggtgttgtagtcgttatagtgttttacaaggtagaattcaagcagaacagtaaatgaggcaaagaaagatgcctggtactgaaggttgaaattcatattagaaataactattacgaatagctatatagcaaaataaagtgccaatattcatgatggaaaaatcataggctatgaaaggagaaattgaaaaatatactagtcttaggggattctccttcacctgtctcatttactgacagattaagtggggaaaaaataaggatatgaaagacaaaaatagcaaaattattaaggtagatttgattaaaacatatcaaactctgtaccctaacaatataggatatgcttcttttcaagtcaacataaacactcattgttattccagttagtacggctgtgtaacaaattaccctcaaatttaattctatgaaagaatgacttattatattcagattctgtgggtcaggtatttcaagaaaggatagtaggaatggcttatctctgtaatgcctggggcctcaataaaagacttgaagcctgggagctagaattatcagaagattcatatgttcatgtttggttgttgatgctggctgttggctaagggcccccctttccctgcatgtgggcctctccatgtggtttccttttgttggctcatttgggcttttcatagcctagtagcagagttctaagggtgagagtcccaagagacaggaagacccaggcagaaataatagaatcttttatgacctcagaagtcatacagcattactttggccatattctgttcattacggtagttacaaaagtcctgctgctcatgttcaagggaagggcaaatagactctgcctgttcatggggagtggcaaaattctggaagagcatgtgggaccagaagtattgctctgactgattttggcaaatacagtattccccggtaatatactgactggatcacaaacaaaatttcaataaatttcagtagatagaggtagtacaataacactgagatcataatataataaaaccagaaataacaaaattagattgcaaaaaagccctctacccagaaattttctagtactcttacatttcaagtcagagataacatatatggttaagaattcctgggggattaaaaacaaacaaaaaaaagataacatataagcctaaactgtagaatagctagagaagtatattaatgaaaccattacctatgagaatgtatagatagatttaagataattattagaggaaaatagatagcttgaagtacatatattaacttgaaaaaataagcaaaaattgtaaaagatatattaagcatctgactcaaaaacaatatcagcctcataaatcaaaggaaagtggaagggaggaagttttaaagttaaaaataaatattaataagatagaatacaaaaagtataatagaccaaaagttaatttttttgaaaaactaaattattaactatcccaatcaaggaaaaataaagaaaatgcaaatatacaaaataaaaaaataaaaagccatagaaacaagagaaaactaaaataatcctaagaagaaactgtgtttaattctgtgcaaatatctgaaaatctacatcaagtggataattttgtaggaaaatataatttcccaaagctgaccccagaagagatagaagattgaaacagtttgatttccacaggcaaaataaagttcataaagacctatcacttctcccacaaaaacaccaagtccaggtggttttacaaggaaattttaccaaacattagaagagtagatacttatagtattctgctaaatgtttaacaaccgggtctgggggctggagcagggagtaaaaaaaaccctgatctgtactgtttgctgatttctaagcataaatatttctgtcataatttatttcaagctacctgtgtgacatcacttaaagtgaagatgagaagagatgtgcagataggctgttgtgagtcagtacaagctggcttttgcataacatggagctgatcccaatgctatttaaactgttgcagggtatggaagtactactttactcttacagaagtatatttacagagtgaagaagtacttccaaatttcttttgtgaagtacataaggcctttacagaaacactgataagggctttatagaaacactgataaggattacagagaaaataactgcatactcactccaatgttaactataggtgcaaaaatgctaattgaaagaattacaaacagaatctagcagcataaaagcagagtaaaacatcatgtccaagtaacatttattccaagtattcaatgaaatttcaatattaggatactcatttatttactttttttagtagatctgatgatgaaacccataattatatggatgccaaaaaggctttggccaaaaattttatagccattcttgataaaaagcattcaaaaatagatgtgtacttccttaatatgaaaaaacacatccatctcagtccaaaagccaacatcaaacttagaggcgttcctgtgaaagtaaggacaaaacaagatatctgttactacctattatttaatgttttactagaaatactaaccaaagcaattagatatgagaagagattacaggcatcaaagtggaaagcctattataaaagtttcatgtttacaggtgattttttttttttttttttttgtgagatggaatcttgctctgttgcctgggctggagtgcagtggtatgatcttggctcacctcaacctcagcctcccaggttcaagaaattcccctgcctcagtctcctgagtagctgggattacagacccgtgccaccacgcctggctaattttttttggtatttttagtagagatgaggtttcaccatgttggccaagctggtcttgaactcctgacctcaggcaatccaccctcctcagcctcccaaagtgctgggattatagatgtgagccactgcacctggccaggtgatttttgcacttggaatttaagggaaacaactaaaaatctaaaaaaataattcagtgagaaagtaaaatatacagtgaatatgcaaaatctttagactttttatattgaaatgaaagcctgttagtattttgaatgaaaaacttcatttacaaaagcaacataaaagataataaattgggaatattataatcaaacattaacaaaaatatacaatatctccaagaaaaaaaacccacaaaaaccttctagaagggtgtgcacaagaattcttgacattaagaacagacattcgtattatttttaaggaaaactcaagatcataaatatgtcatttacctctttgtaaatttataaattcattatgaaatcatgtaacaaagctttttttcttccgttttaaactagaaaaactgaatctaaaggtcatgtggaaaatatgcaaagataatagctgggattatttttaaaaagaattataatgagggaaaatcagccctattggatatcaaatatattatggaatgttaataattaaaacaatgtggtactggcacaggactccccagaataatggaatagaataggtagtctagaactagactcagttacatgtagaaatttgtatatggtaaagtagtatcttaaataggtagggaaaagatgggccattcagtataagtttgggggacatataataggtatttggaaaaaaatttagatacataccttacaccttacagcaggatacgttgcaaatggattaaaattttaagtgaaaaaaaaaaagaaatcatacaagtactgaaaaaaaagcataagataactcataattcagaaacccagatataaaaagcaaaaatggacaaatttgactttattagaaatactcttgattttatttaaaaaaaaccttttacacaggaacacaaaaccttttttttttttttttttttttttgagacggagtctcgctctgtcgcccaggctggagtgcagtggcgcgatctcggctcgctgcaagctccgcctcccgggttcacgccattctcctgcctcagcctcccgagtagctgggactacaggcgcccgctaccacgcccggctaattttttgtatttttttttttagtagagacggggtttcaccttgttagccaggatggtctcgatctcctgacctcgtgatccgcccgcctcggcctcccaaagtgctgggattacaggcgtgagccaccgcgcccggcccacaaaaccttttaagcaaagtcaaaaatgaatattgaacttaaaaaattatttggcaattgtattacagaccatgataaatttagatatatatttattttatatatatttataaatttatatatataaataaaagggaataaaacaaggtgtagaatagtatgtatattatactgctacttatgcataaaaggtgggacaataagaatctatatttatgaaaaaactctgaaagatgcatgataatagtgacaatttatggatgggaaacctaggcatggaaaaagagtatggtggggaaaagacttaaccttacacgtgcatttactttaaagctttggaccatgttcaagaataaacaaattgaattttcaaagagcaaaataaaattcatactgccaataacctaacaattacacatggctaaagggaaatacacagaatgatattcattgaagcatttttctagtagtaaaatacatacaaaaattatatgtctgtcaggaaagaaatgattaaaatatggtaaatttgtaatattgaaggctatgcagcacttaaaaaaggttaaggtaagcaaaatactaatataacagaaagatctccaagacatatttttgagcaaaaacatgtttgagtgcaaaagatttgtatggtgttggcagaacttatttatttaagagtacagtgctatacacctttttgtgtttaaaagcacaaaagtatacacacatgcagacacacacagaaatctataaataattggaaatagttttgaaagtgtagacacaaaactcctaacaatagttacttctacgagaggactttgtttggagtggaagagagtggaagagggtgaaaaaggacttcagatttttcagtattggagtttttattaaaatatgctaatattttactcatgcaataataataataaaaagtctcaaagaaggtgataactttgggtgatttataactgttttggagactttgcaaatttgtttccccaaggccaagtgataaattgtttctgtgaaaacatcccttttcttcttcagatttaaatattccagtgttgagaatccacagtaaacttgctgtactctgtcactgttgaggaatgggacattcacatgaatcaaatatgctggtaaataaagaaatatggagaaaaatatagaggtacgtgcatatattgtatggcttataatctactgagaatggagaggaagacatcagcattaaaaatattctttattgagtgaattctttagatccaggcactgtactggaatctttacatatgtttgtgatctcatttaatccgggaaacatctcataaagttggatattatccccattttatatatgaggaaattgaagcttagaaagatatttccttgtttacccaaggtcccagtgctaataagtgtcctccatgagacgcaaaaccaggtttctctaacacctgaagcctgtgttctttcctctgttccattctgccccctccccaatacaatacacaacaatacaactacactgaatacattttaatgtttcttgatgattaggagagcacttctggcttttttgaatgttttggaatccctttatgagcgtcaattatcagaatactagtgaagcatggaaataatgtctaattggagatatctggttaaaagaaagcagagtaatactgcatcgacagaatttagtgcttttattacagatagataaaggtatggcaaaatcactggtgtgattcttgcatatcccctttattaattgatctgcatgttctgaaggccgttattccctatatactgattccaaatgttctgtctttattagtccttttatataaaaccttgtatctctatttgtcatcctaaaaatattgcttaaatacatgatgcagcttctctccacattggaatctgataacgaaaggtcttatctctgtagcctgaattaacatgagcagaatttaggtatactacgccaatagcttcatggacagtccctttggttatagattataaatgccatttagagaaagcacaggatggctcctgagtgtctagtaaacttcaacaaccacctgagagatacctccgtgtgactgcatgaaatggaaataaagaatggcaaataacccattgactatgcactttctcacccgctgagagcaaaacataatccgatgcaattttagtacttacatgcctctggggaaaatagacccctaaaaatcaccgagtgcagcactggaaaaattccttaaatttgtgctatgcttggtgttataaaacccaaggaaccttagatgttcttcttgagtaaaatggactggtaattttgttttgttatattatccaccaagcataatgataatgggtcacatgcaatttaagaaaaaattaagtctaataagaaaaatctctaataaatactaacagcatcttattggtatcatcattggtttaacccttctattaacatttgtttttttacatattaaatgatctgtaatatgttgaaaatgaagaggatagtaaaaattaaaacaggcattctaataatatatgcattgtacaaatgtttgcatgcttcttccctcaggcgagtactaggaggtgtggtacatgcatgggagtggtgctaggatagagcaggagattttgattttagatatgctgagcagtgaagatgctcagtgcaggggatagaccccatcattaaccaggaatgcaaccaattcaatgaaaaacagagattagaaatcaaaatgtagccccgaggaaagtacacagttatcccctcaaatcaggcttcttctgggccactgagaaagggtgaacgatcttagggaacctctggtacccaagcaaagggcctgggggctcctgtgcattgatagctatccatcacgggcaatgtggtagagtggggtagagctagaaggatgtattcaggaagctgccattattagaaatgtgcttctcaagcctacataagaatctcctagggaacaaccataaagtaaaagtgcttaagcacgtatttccaaggattctaattcaagggaactgggtaacaccctggcatctactgtttttaatgagttgttctggtaacacctctgcatgtaaacatgtgaagacgattgcattaaatgatattgacaaggagtctctttcccctagtcctttccaccatgtggtttaggagaatagcaactatttccaaaccctactgaatagtggcagccacaaatgtcttgccatgtcaggctctcaatggtttctgagaaagattgaacagccttcaggaggctaatctatgattaggtatttgctatgcaagacactgtacatgtgtagaaatggcaaaggtccctgcctcaaggaacttacagtttaggaggacctagcagacagaaactcagacaaataaatgcagcaaactgtgacatttgctgtgaaaagccatttgtattggataatggggacaaatggggtttggtcattagctgaagggttgcctaggtcagcataaggcttgcacaaaggagtggcagatgaggacatcacaggagccgtgttgaggaggtcaaatacttgggtagtagccacatgttggttgtaaatgtgtgtaggagggaagagcatgaaataactcccaggtttttctggcatgagtgtctttgtggcaggtgaagccattgtgaggatcagcatttggaagaactggatttgaagagaatgttgaatatgaagtattcatagtctgtaaatggagatgttctaatttgtgggtcagcaaacttttatcacaaatggccacatagtaggcattttaggcattgcaggtcagtctttgccatgaccactcaactctagcattctagtgtgcaggtagtcataggcaatatggaagccaatggggttggctgtgttccaataagactatttagaaaaacaggcagtgggccagatttggcccatgggagctagcttgccactcctgctatatgtataggtatgatctgaagataaaaatataaatgtagctatgttgactcacatacatacatatatatattatatatatttacctagtatctttctatgtagacttataatcatacctatttgatataaacgctgcacttcctggttatttgggataaacagttttttcaaactatccaaaagtcacctaataattgtctataaagaaacaattaaatatgaaaatataaattaaaacaacaaaatacattttgtactcagtggttcagcaaaatttaaaaatctggtgataccaagtgttaccaaggttgtagagcaacaaaaactgaaaagctatttcaatgggagttgtgaattaatgtatctctattggaaaacaattgattattttctagtgaatttgaatatatatgccaatcctaagttccagaaatctcactcctgggactctaccacaggaaaaactattatacatgctcagatcaatatgaactatactcatagcataacaaaacaaaaaaacagaagccggaaacaacccaaaatgattcattaaataaagtgaaataacattcaatatggacaaatctaaaaatcaaaagaaaaagaaaccgactgaatgataccatataatatcctttatataaagcttgaaagtgccaaacaaaacactgttgtaaaagggtccttacatttttggcaaaactaggatgaaaaccatgaaaatgaaaaactcaaaatgcaggtaggtggaggcaaaaaacaaaaaaaaaaataaataaattctgacctgataggaacgaccaatgggatttatttatttctaagcttggtaatgggtagacagatatttttaaaatgatagctcttattattttacatatgttatatttgttccttaacatcaagcaagtcttgcatgataatgaaaaggcaaaaccaaaatcttattaagttatcaattttatattttcaaaaaataattaagtcaagtttattcttttgttcaaaagaaacgttcattatggggaccgattttttttttttttggtctggctctgtttctttccagtcatgtcacctctccccatgacagagggtcagctggcttccagtgtttcagctaggcaggagtcggggattatggatagcatagaagagggaggaatatcaggaaggagctaacgttgctggtgtagggtcatttgagttcctgtatctctaggagaacaagcattgtctttggcataggacagaatgtggtcagaatcctctctgtcactcagaaagtaattccattgctgtcttaatattatcctagtcatctggggttgcaggaacactgtgtagtggttttgcggtgtggaagctattgctacataattttttatttcttgaatatcactttgtagtgtcatgattacaaggcttggaagaagataaactctctgtccattccgagtataaatgggcacttgagatgaaaccacctcgttaatttccccttgttgctgaagtagaatctgaatccaaaccacaacacaacctagcccctaaatctctattaaaaaccaccttgggtagtctggcaaagctttatttaaagtcagcagagaattataaagtcaaacgtgaaaaatggtacaacaagaaagaatcataaaaaaatactagatcagttaaatgtagtcaaaggcaatttagtgtgttctggcaccagcacttattgatgcaaagaatgtgatatgtcaggggttggcaagagcatgtaggaaatgcagaatgaaggatgcagctccacgcattgactccgaaacagccatacatggctgcagaggatgcttcagctaccttccttgcttttctatcaggaatttcagggagaatattcgaattcccctaggatggacattttctgttcttttgttcttgatatagtttatgttttaaagtagaattctttctttcatggagataagctaacatggagactgtgtaaattgggtcagaccaggagggtaagtaaaacttgctggtacttctgagtatcctactattctagtttctctggggctgctacatttatctgcttttttacatccatctccaagctgtgagggtttctgcctcatcttcttcacccctttggtttcccattcaccaatattagcagatttgctcagtaatgaacacagctaccaatgttatgcacccacccctttccaggcactgtgctaggccctgcatatacattctctcactaatcctcaacaagccccggtgattcttagaactctagtctgaaaaaaaaaaaaagcccctgtgagataggtcttatcagcatgttgattttacacataaggacaactagggctaagagacttagagctcatttgaggtgccacagaaacagaactcactaggccggactcctgtataggagcaggcgctatgtaagaagtgttggttctctaacttcatcaacagtaaaaggtgggtgccagtacctctaggggacagagtacaggatagtatagtgtcaagagcatcaggctgaagtctgggtttgaatcctggctttgccacttattgactctgtgactctggagaaggtacttgaccactctgcatctccctctccataaaatagggacaataataacacctgccttactaaggttgttgtgaggattatgtaagttgctatgaatagtttcaaatagttactgtggaagtgctgaatggtagtccccttacctctaggggatgcattcaagatcccagtggatgcctgaaaccatggagagtactgaaccctatgtatactgtattatttttttgtgtgtacatttataactgtggtaaagtttagtataattattaggcatggtaagagataacgataactgataataaaatagaacaattataagaatattccagcatcactacgcttgcactttggggccattattaagtaaaatagggttacttcaacacaaccactgccataccacaacagccaatccaatagctgagacagcttctaggtgactaagcggccgattctatatacagaatggacacactggacatagcgatgactcacatcctgggcaggatggaacaggatggtgtgagattttatcatgctactcagaatggcatgcaatttcaaacttatggattgttgatttctggaattttctattcaatattttcagactctagttgactgtgggtaactaaaaccatgcagaaagtggataaggagggactactgtatacatattgttgctgctgctgtttctattattattattatcaatagtgttgttatttttgtcttaaaaaatatatccctgaaagtagagtgccttcactgaaagaagtggttgtggatggaatcagggacaggggaggtggaaggaccagcccctgtggcaggtcagatgggaggatgttcttagacatgccactcggtacccttgaaatcctactttggtgtgggccatatccacttttggtaaactcatttgccccaaatgaagcagcttttgaagatcaaacaagaaaactggattctttgagtatatccagcttgagtacttccatgttcaaaatgcctttctttcctgtctacagattcacctctaggagagaaggaaagaagtttggagacttcctttggttctagcaggtcttatcagagtctcagtgtagactgaagaggagtgattgctatactgtaaatgctttagagggtctgaaagagattagagaaacctattccagaggataaaggcaggacaagagggagccattaatctcatggacattacattccctaagaactttttttgggaatggccagaagcatgccaggccatgtgctgtccatttgcaattctctgagctgtggagttgtgtgtgtgtgtgtgtgtgtgtgtgtgtgtgagatagattgaggccaatgtcattgcctcatttacaatggttcttaaacttgaactgaaaggttgacacatgcatgcagagtcaatgcagattattcgactgaagtagtcctgacaaataccagggctctccacattgtcaggaacagtctgatgatgacacgttcgaagctccgcagactggcttgcatcttagtaaatgtgtacaatcaggggagacatagctatgccgtggagagttctgagatgtgaagagaacaagttaattgttcagcctcaactgagacctttcactcaagtcattaatcacagtgcacagtctggagtcttggctctgaagttcgattctttaggctgctttcctgctccagatgaaagctcattccaggtgctggccatttgtgttttcctccaactaggctgatttatggacctggagatgttttctggtttttccaaattctgttccattactttgtaataaggggggacatgtgatttctggctttttgcagatcctcagttttaacatccctaataccaaagatttttaaaattagtctgtggtctgctttctgtgatctggagaatagaaatgctgttctgtattttgagtatcaaagttaagactttagggactcatttctttccccttgagctggagttgaagttgcaagggatgggcaggaaactgtgttcctgccttcaacatcccaatgcaaattaaggcttgggaagccctagtgacagcaactgactgcaggtgttggagatatccccgtcccacccgaatacatatggctcagggtataatattaaaggacttccacacttgggctaggtctctggtgacagtgtaagccaatattgaagatttcaaaggagaatctgagtgtcaaaggaggacattgtgatatggaggctgaacagggtgctgccaagtgttagctgtttgactgaaaggtaaaccagatctgagttgatatggggcaacagatcccttgggagttttcccaggaggatagaaatgtgtcacagcaaagtaattggaaattgatatttggcatatctctgggttactttttattccagataataccaagagtcacttggtattggccaagagtcattagtgacttatacatcaaatcccataacccattgctgaaatacaatcttctgttcgttgacagtagccagctgcttcctggtcctctgcttcctaactagtactttatgttaaaggcccatggccctgatttaggtgaaatgagtggtaaaaatagcaattcaatcttataaaaaacctgtctatacttttaaaaaattgatatataatcattgtacatatctatgcggtgcatgtggtattttgatacacgcatataatgtgtaattattaaaccagggtatttgtgatatttatcacctccaacatttatcatttctgcgtgttaggaacatttcaaatcttctagctgttttgagatataaaataaattatttttaactatagtcataattgtgctgtcgaacatgatgtcttctatctaactaaatgtttgtgcccgtaaccagcctctcttcatccccctgcactgcaccaattctaccttttgataattctctgaaacgaaattttcactggcagtgctgtccttcaaattcaactcaactcaacaggtacttgttcagagcctcctatgggctttatattgtgttgtgtgccctgggacctataaaataagtatcaaacatgacctttgcccttgaaaagcttatgagctcataggaaggatgatgtgtttatgaaacacattttacatggcaagataagctatcgtgtatgtgccaaagtgactagaatcgggaataagtgcaacagagagtcagaaaaatgagagtaggttgtactggaactgtcagagaagctcttatggatgaggtgggacaaagacacaaatatcctaaacccagaactctccgttaaagaaattgtaagaagcacagcatcaggttaccaagaaattatggagcccttttaagtgaaagtaatttgttcaatatgagaatggattaatttagttccataaatatttattgagtacatgcaatgtgccaacaactatacctgatgtgatcaaggaagaataatgagtacaaaggacacgtgtgtgttattctcagatgctaacttctctcacataggtatttaaagttattgctggtctgttgattccaaagtctgtgatttttatcatttaccattcaacctctcaaaaagactttgtcatccaagatatatttggttgaggggctgagtctaattttttgtgtggtggaaaaatggcatgtctaactgcataagttgtatgaagtgtaaagagttgcatgcatgccgattgtgaaagaaagggacgttgaattagcattgaatgtgggcccaaattattgggttagggagtatttggagtagcattagaaaagcctgaacctggcccacattcagggctataagtgaagcccaagttctctatagatcaagcttttcttggaacttgtattgttccccttgacagctgatttggaaacccaattagaagggcctcccatcattagaggtgaggcagtcttgcactgagctttgttatttgagaagtttaaaattggctacacccagatatattggataactcactaaaatctagaattgatctgtattcctccttgtaaaataaggaaagccattatgtgttcatttctttgaggacaggtataactggacaattgcaaagtgttttagaaagaaaacaatgtcaggatgatagtggtggtagtggtcatcgtcatggagatggtagttattattccaaatatccagataattttaaaataatataaccatagaacgctagtaaatgctagaaagaatctaagatatcaggcatggaggcacagaggtgtcaaagtttatttagcgaagcaataccagaagagaactagaaaatcctgcttcctagctggctgtcatttgcatacaacaatgagacccctgcttagtaacccctgtgtttctgccacccatgtgactgctttctgaagctaatttagttatcaaataaaaaatggaattttgagaaaaccgtatttttttttaaactggagggattggtggaaggaaaagcaagaagaaatttggaatcttggttcctgacattttccttaatgttcaattactctcttcattggaaagcttcgtcttggcctctatgggtgacacatccacttgtggtcactcactcctatgtatgcgtgtacatctgttgatatgcattcctcttcatcatctgtaggcattttacaaataatggcttgtgtgtgcgtgtgttttttatcatcttatgtttttaaatgaaaatgacaacttgaaaattctttgcagaaataattcttctatggtaaaggaatttcagcgtgtcttccagggtcatctttgggtcacataatttcatggaggagttggcagtgggtgggagggatataaacaatgactttggaatttttatctttccatcctgtggcaggtgggcaatgttggtaacaaagaaagttggttggtggagaactaggaaaatatagtcaaataagaaaggtacaacaagatgtgagtgcaaaccaaaaaattggcaagtgcaaaacaaaaaattggcaaggcatagaaagagagaagaggaggcatggatacttttcccctctcttccaaccctgctcctctgtgaagccattgctgaggtgggggtgcgatcaggagagtatataaaggagcttggactttgcagttgtaactcttgtttttgatgaaactgttttggaagctttcttcttgaatagagctgggggatctgagtgggactcagaagagaggagaaaggccatttggaactcgatccagattctgggtttaaagatgagaaagtattacagggtttccataaaccacggagttcaggttggcagcatggaaatctgatccagtttttactcaccaaactatgtgtgtggaggtacacatcagaggggtacctttttcatatttatccaaagcactgtgtagaagagactagtccctggatgggggaattttaaacttccttctaagttttccaatcctatctgcatatttttagagccggagtttctaagcaaggcactctatattgtttgttctcttgggtagttaagcacagacagcagggaagcatggtggctcacagagtgaactagctgcagagaccaacttatccaatgaacaaagtaggtgtaaaatgaaaatgactaaaggggtccttgatttcactctcttgagaagtcagccacaaagccaagtgcctagagacccacatttccagcttctctcgtctccagtctccctttaggaaggctgtgagcaaacctggccttcgtggttctttcttccgtctgtaaactccctgtaattattatgcagttccttatgctaggtaccatgggactgtgaggcctccggaagaaactcttgactttgaggagcttggaggccattgtgaaaacaggaaagacaagcacaatcctggtaaatgaagtgtgtacaaagcctgtttgacaacaaagtcctctctagaggaccttgaaaaatcagagaccgccatcccatatggagaggtccttccaccctcacctcaggggctgtttttctctcactgaagaatgaaaatggtaaatggcctcaagcaagctaaaagcagatccctcagctttattcatttcctgactgcaatacttggtggtagtattagaaaaggctctggcagtcctcgtaggagaaatgccagtaatgaggcaatggaacgttcattcacctgctttatgttcttttggaaataacatgatttataaaagaatacagaatcataattgtcagccaagatgtcattttaaccttaggatgtccagaaacaaagggatattacatcctttgttcttggagcaccactggtgtcaaattatgcacagcgtttcctcttggcattaagtgcttgtgagcctaacagcaaccaaacactgacttcagaaagatgatgtttctgatggttttctcacctgaatatctccttggtactatgggagagagcatgggcctcctagcttccctgcattctgatagagcaggagccaggaggcatggcagtcttagaaatggctaagggttggggtacactgtctttggcctctatcagaggagctgaacaagagtcccattaaaatgctggtgaaataattcataaccttgattttatctgcacatcaacatatgccaacagatgctcagtgcaaaacatgaatatttgattaatataaaatcaggcatctagagcagagagcgtggaatgttgggggttgagtaggacttacatgttatccatctaatcgcagctgtctggatgcacatagtaggcattggaaatatccataattatattttcattgatttgaataactctgttgcttggttttgagcccagatgtttggcgtcccgctggaactgtgtgctctgcctcctgtcatcagtctcatcagcacacagatgttcggcaagggacagcattcctctagtcttcattgtgaggcctcttctctgttctcccagcccatccactagggctcctgtgacagtcagccacagaacacagtgcaggtcacccatggagctaggtgcagaaactgtccaccacaccattttgtcattgtggttttatccaaaggcagagaacattggagcctcagctaacagaccagactaatgctggtaacaagtacttgagtggttatttcatcattcattccattggtcattgaaaaaatattgagtaaaggcttattagtccacagcacttccctgaaacctgaagaagacataggagaagacccttggtaggagatggagaaggttgcactgtgagtgagaatatgagacattcattaacttctagggaatgataagactggttacattagtgctgatgacattcacagcagaggggaggggaagctagttggtagagtggatagatagtacactagatccaagtctgtatcttgaatctctctcataacaccagcgtgtggctgtaaacccaggcctccggtttcctctgtaaaataaaggagatgcactaagatgctttctatgcctttcagtactatccttcagtttgctctgatcaagaattgaagagatccccatattcccgtggtttaattttccctgaagaccttggactgaccactttcgtaagtaatcaggtagacttctaatagtcaaaggacacatgaatgaaaggtagtgaaagaaggcatacactgatgccttaatatcttggttagaatagcggcttttgaaagtctatgaaaatcaattttggataataatagaaaaattcgttaaggctgggagtagagctttgcttcaaagtgaaatagcagcaagttttacctttgctcatgtaccatcattcttgaattagttattaatctcaggaccaagagcaacttgttgcccttggatcggtccagtggcatttctttttcttttgtttttttttatttttttgagacgcagtttcgctcttgttgcccaggctggagtgcaatcacacgatcttggctcatcgcaacctcccgggttcaagtgattctcctgcctcagcctcctgagtagctgggattacaggcatgtgctaccatgcctagctaattttgtatttttaggagagacggggtttctccatgttggtcaggctggtcttgaactcctgacctcaggtggtctgcctgcctcggcctcccaaagtgctgggattacaggtgtgagccaccatgcccagccctagtggcatttctgacttccttggttcacatggtcttggtatgacagccctatgaatgggtacctgaggagctctgctgccagtgttcaaggtggcttctctttagctcatctaagatacaggggctatatctttaaaaagtagagacaggatgattaatctgtagttggacagattaattgtggcttccaatctcttcagaccctgtgtaggcagatcaagtaacttacctacataaaaggcaaagcacagaagtcatgaacattctcacttctgtgtagtactatatagcttcctgaaaggtttataacaatttctaaccaacttgtttaatccccacagttctgtgaagtcagtattatattcttacattgtaagtgaggatattgaggtacaaatgtatttgtggggttggaaatttctcacaggacatatttggtggatgctgggaagagctactctcctgaaactccaaaaccccctccctccctcacctgctacagttgaactttttctgtaagttaagacatttctgattctgggtactcttttaaaatgcagatacccctggaagagaggtcagaccaaatttcttattgcttaaataattgcctgaataatgttttacaatcattttcatctaagatagttgaggacagcatgctaacatattaaaatcaggattaaatgggctgggtgtggtggcttatgcctgtaatctgagcactttgggaggctgaggcaggtggatcgctggacgtcaggagttcaagaccagcctgggcaacaaggtgaaaccccgtctctactgaaaatataaaaattagttggatgctgtgttgtgtgcctgtagtcccagctactcaggaggctgaggcaggagagctgcttgagcctgggaggcggtggttgcagtgagtcgagattgcaccattgcactccagcctggatgacagagcgagactgtctcaaaaaaaaaaaagaaaagaaaaatcaggattaaatgaagggggaccaggatagatttgggtttggggagcttgtttaggagtagctatctgataggggtataacaatggtgaccccaggactccagttctgaatgaaggaagtccccatctaagggatagtatgggacacggagcaagaagataatggaaacagagcaactctttatatttcagacttggttggcttatttgtgctggatcgacccctggtgagtgggcaggattgtgatggatggggtcaagcttatctaccattacatgccaagtacctggcttagggcattgatccattttatatactctcttattttgctaactacttaaggcagaaaaatcattcccctattctactccaatatgtgccagttgaaagtgaaatcctcacactgagcaaatgcaccaaagaacactatataaacttaatgagggagatgaagagatatgtgccagaaacctagaaaatttaacactgatgaggttatgactattatatgtttagttaaattgttgacactgacaggacgtggctgaggaaatctaccatccattttctccttgtaccagtgataatggttccttggtgtgctcttctcagttaacaaaaatattcccaaaagttaaatgcagggagaagaagtgacataagaagtacttttattatctctgttcttctgggagttccctccagaaacattatttaaagcagtacttctcccgactggcaaatgagtttgaagggaaggactcacgagttcagaggggaccggagaggctcctaaccctgtgcttgaaggcttgctccagcaaacccacataacacgacactgccatagcctctcaaaaacacctttctcttccattttcttcctttcaaaaactgacaaaggttatccacgggctagtgaataaaatctcaattcctttagctgacattcaaggcacaaatgtgatcgtgatttttgtaaggtgtcaagtgctgtataaacaggtggtggagagagtattgaatttgaagtcagaacactttggtttcaatcttgttaactgggtgaccttgggccagtcacttgatcactctgaatctcagttccttcacttataaaataggattatttcaatagttaaattaattgaaagtaacatagtacttagcaaagagtgaacattcaatacccattaaggaagagatggttaccagaggcaatttattctagcatttaagaacattcactatggagacaaaaattagtaatcttttttatttatttatttttgttttagattcagggggtacatgtgcttgtttgtacccccctggtggggttgggcttcaaatgtacctatcatccaaatattgaacattgcacccaaaggttaatttttcaacccttaccctccttccaccctcccgccttttagagcaatctttcttttgtctttgatttctacctagaaaatgggggtaagttggaagacttagatgagttaatacatatcaggaactttcaatagtgcttggcctatattgatccttctataagtattaagtcttttcttgctactgttgttgcttttattgaatgacctgtcctaatcttatttttcctgacttatctgattttctattttaccagcagacagagctcctccacaaagtcatgatatcattagggtggggattaattcctacctttaacttccatgagctttactcaatgcctgcaaaatactcaatcatttttgttattaaaaagtgtacaaatgtgcttgctaacatcgacctagcattgtgctagaggtttcagcctgtggagtaaggaaagaaagaaagaaagaaagaaagaaagaaagaaagaaagaaagaaagaaagaaagaaaggagggagggagggagggagggagggagggagggaaggaagagaaagaaagaaagaaagaaagaaagaaagaaagaaagaaggaaggaaggaaggaaggaaaggaaggaaggaaggaaggaagggaggaagggaggaaggaaaaagaaaagaaaagaaaagaaaaaagaagcatccagattggaaaggaagaagtaaaactgtctttatttgcagatgaaattatcatctctatagaaaattcagtggaatgtacataaagctgttagaagcaacaggagaatttagcaagttacgggatgcaagattaatatgcaagtcaattgttttagttccttaaacttaagacagccacaagtagaccagtttaactggagcataggatgagtgaggggtagtgtggtatgtaaaattagaaaggcagatctagataacatggaatacttttgcttactctttctctgccttccttcattccttttcccctcccccacctcctttctttctttttcctttctagtttcttggtataacaacctttttccataaaagaagggtagaacttctttcttaaaggcgaagttatttattctttgggttaagtcaaacaaaatgaccgtaactacgttgttttgagcttacagttaatgttctgttatatataaaatgttcccaaagacaaggagtgaaatgtcagcaagcaatcactggaacatagggtatcaggattcaagttctgatttcctcttaactagctctaataactttgggaagatcacttcaccttttaaggcccagtttgctttgtcttaaaaaagggataatgattgcatgatttccatatttatagggttgttgatggcttactccaacaaaatttttctagttcttagaaactctaagagctggagatagggaatcactcccctcagggaatatttagtgaaaatatgtgtagaactaactccagtggcataggataggctattcagagtagtatacataagggcctaggagagtgcaaagaagggattaattaactctgcttgtggggttgggaaaaatttcgctgagttgatatctaaagccaagctcacagcttaagtgagatttttgacagagaaagggacaactttaacatgataatgggaataatatcttttgtttgtttagcactttaccattttacttgacataaattagagtgatctaaaaactatatggacgttagggattattattgctatcctaggggtggttattactttaaactacttgtttgataaggctggggaaattttgaccccaaattgtaacaatttagaaaagtttatgtaaaatttccagggaatttttccatgttgggggaaccaggagccttaggagcttggtggggtgtcaaggattaggggaggggcatgggaagagggaaaaaggatattaattaaatctttgcaaaaagatggctcattttgtaattatggcataacttgctgagtaaagatgcaataatatgaaaacctggatgtttaacttttttccccataagttattggggtacaggtggtatttggtacatgagtaagtcctttagtggtgatttgtgagattttggtgcacccatcacccatgtatacactgcaccacatttgtagtcttttatccctcaccctcctcccatccttccccccaagtccccaaagtccattgtattattcttatacctttgcatcttcatagcttagctcccgtatatcagtgagaacatacaatgtttggttttccattcctgagttacatcacttagaataatagtctccaatctcatccaggtcactgcaaatgctgttaattcattcctttttatggctgcatagtattccatcgtatatatatacacacacacacacatatatatatatatatatatatacacacacacacatacacaccacagtttctttatccactcattgactggtggacttttgggttggttccacaattttgaaattgtgaattgtgctcctgtaaacatgcatgtgcatgtcttcaaataatgacttcttttcctgtggctagatacccagtagtggggttgctggatcaaatggtagttctacttttagttctttaaggaatctccacactgtttttcatagtggctgtactagtttacatttccacccgcagtgtagaagtgttccctgttcactgcatccattccaacatctactgttttttgatttttttattatggccattcttgcaaaagtaaggtggtattgcattgtggttttgatttgcatctccctaatcattagtaatgttgagcatttgttcatatgtttgttggccatttgtatatcttcttttgagacttgtctatttatgtccttagcccactttttgcttggattgtttttttcttactgatttgtttgagttcgttgtagattctggatattagtcctttgtcagatgtatagattgtgaagattttctcccgctctgcgggttgtctgtttactctgctgactgttccttttgctgtgcaaaagctctttagtttagttaggtctcagctatttatctttgtttttattgcatttgcttttgggttcttggtcataaaatccttgcctaagtcaatgtctagaagggtttttccaatgttatcttctagaatttttatagtttcaggtcttaggtttaagtccttaatccatcttgagttgatttttgtataaggtaagagatgaggatacagttctcctacatgtggctagccagttatcccagcaccatttgttgaaaagggtgtcctttccccactttatgtttttgtttactttgttgaagatcagttggctgtaagtatttgggtttatttctgggctctctattctgttccattggtctgagtgcctatttttataccagtaccacgctgttttgatgactatggccttatactatagtttgaaaacaggtagtgtgatgcccccagatttgttcttttgacttagacttgctttggctatgcagactcttttttggttccataagcattttagaattgttttttctaattctgtgaagaatgatggtggtattctgatggggattgtgttgaatttgtagatttcttttggcagtatggtcattttcacaatattgattctacccatccatgagcatgggatgtgtttccatttgtttgtgtctatgtttagaaatctgtgatttctttcagcagtgttttgtagttttccttgtagaggtctttcaactcctttgttaggtgtattcctaagtattttatttttattgcagctattgtaaaagaggttgagttcttgatttgattcttggcttgcttgctgttggtgtatagaagagctattgatttatgtacattaatcttgtatccagaaactttgctgaattattttatcagttctacaagttttctggaggagtccttagggttttcaaggtaaatgattgtatcgtcagcaaacagtgacagtttgacttcctctttaccgatttggatgccctttatttctttctcttgtctgattgctctggctaggacttccagtactatgttgaagaggagcagtgagaatgggcatccttgtcttgttccagttctcagagggaatgctttcaacttttccttattcagtattatgttggctgtcagtttgtcatagatggcttttattacattaaggtatgtctcttgtgtgcccattttgctaagagttttaatcataaagcgatgctgggttttgttgagtgctttttctgcatctgttaagatgatcatgtgatttttgtttttaattctgtttatgtggggtatcacatttattgacttgcgtatgttaaaccatccctgcatccctggtatgaaatctacttgatcatagtggattttcttcttggtatgttgttggatttcgctagctagtattttgttaactattttagcatctatgttcatcaaggatatcaatctgtagttttcttttttggctatgtgctttcctggttttggtattagggtgatgctggattcatagaatgaatttgagagggttccttctttctctatcttgtggaatagtgtcaaaaggattggtactaactcttatttgaatgtctggtagaattctgttgtgaacctgtctggtcctggactttttgttgttgttgttgttgttttaatttttttaatttttaatttttttttttgaggtggagttttgctcttgttgccctggctggagtgcaatggcatgatctcagctcaccgtaacctctgcctcccaggttcaagtgactctcctgcctcagcctcgcaagtagctgggattacaggcatgtgccaccatgcccggctaattttgtatttttattagagatggggtttctccatgttcatcaggctggtcttgaactccagacctcaggtgatccacctgccccgatcttaggtgatccacctgcctcggcctcccaaagtgctgggattacaggtgtgagccaccgcgcctggctggtaatttttaaatgaccatttcaatcttgctgcttgttatttgtctgttcagggtatctaattcttcctgatttaagctaagagtgttgtatttttccaggaatttatccatctcttgtaggttttcctttatgtacataaaggtgttcatagtagccttgaatgatcttttgtatttcagtggtctcagttgtaatatctcctttttcatttcttagtgaggttatttggatcttctgtcttcttttcttggttaatcttgttaatggtctatcaattttatttttcttctcaaagaacctgccttttgtttcatttatcttttgtattatttttgtttcaatttcatttacttctgctgcgatcttggttatttcttttcttctgctggatttggatttggtttgttcttgtttctctagttttttgaggtgttactgtaaattgttcttctgtgctctttcagactttttgatgtaggcgtttagggctgtgaactttccttttagcactgcctttgctgtatcccagaggtttcaataggttgtgtcactattgtcattcagtttgaagcatttttttaatttccattttgatttcgtttttgacccaatgttcattcaggagcaggttatttaatttccatgtatttgcatggttttgaagattccttttggatttgatttccagttttattccactgtggtctgagagagtacttgatataatttcaattttcttaaatgtattgaggctcgttttatggtctgtcatatggtctatcttggagaaagttccatgcattgttgaatagaatgcgtattgtgtggttgttgggtgaaatgttttgtatatatttgttgagtccatttgttccaaggtatagtttaaattcattgtttctttgttgactttctgtcttgatgacctgtctagtgctgtcagtggagtattgaagtctcccactattattgtgttgctgtctatctcatttcttaggtctattagtaattgttttataaatttgggagctccagtgttaggtgcatgtatgtttaggattgtgatattttcctgttggacaaggtctttaccattatatactgttcctctttgtctcttttaatgctgttgctttatagtttgttttgtctgatataagaatagctacccctacttgtttttggtgtccgtttgcatgaaatgcctttttccactccttcactttaagtttatgtgagttcttatgtgttgggtgagtctcctgaaggcagcagatagttggttgctgggttcttatccattctgctgttctgtatcttttaagtggagcatttaggccatttacattcaatgttagtattgaaatgtgaggtgctgttgcttttatcatgctctttgttgcccatgtacttggttttttgtttttgctttttaacttgtatttttgttttataggtcctgtgtgatttatgctttaaagaagttctgttttgatgtgcttccaggatttggttcaagattttgagctccttttatcagttcttgttgtggtagtttggtaatggtgagttctctcagcatttgtttgaaaacaactgtatctttccttcatatatgatgcttagtttcactagatacaaaattcttgcctgataattgttttgtttgaggagcctgaagataggtccccaatcccttctagcttgtagggtttctgctgagaaatctgctgttaatctgataggttttcctttataggttacctggtgcttctgtctcatagctcttaagattctttccttcatcttaaatttggataacctgatgacaatgttcttaggcagagatctttttgtgattaatttcccaggtgttcttttgcttcttgtatttggctgtctaggtctcttgcaaggccgggagagtttgctttgattattcccctaaatctgttttccagggaaaacctggacatttaaatgctagtttaacatggagcagaggactccatttttgtaaaatgctgcaacctgggaatttcctttcataattttgatagacatatggcacttctggttgagaactgggcctatagcagtggcttaacttaagggttccatagatccttgccttggttcaacatatcccatctacgagatgacaaatgtttgattgaagaagtattgaagagtatttggaaatgtagacaaataacagtatctggagcttgcagcacagtgggaaatggagccaagactgtacctataatttagggtaaggagcaataatgaggtcccataaaaataaaaaaccatgatgttaaatagactgcagatcatttgcaccttgaggcttttcttagattttatgccagcaaaaaaagtagtaatagggcttgtgctttatgccaaaagaattcctcgtacacaagattttatttgctttagtgtaatcaaagagaccctccccctaaaattatataagggtaaaaaaaaacaaaacaaacaaacaaaaaacccatccagctataaagagctgccagcctgggtttggagcatggctttaatcctctgtgcctggggtcatattgtttttatcttgcttttgactctatttcaaagctgatgttgctatctacaaaccttacctaacagctataattatttcatttgtattcactatgaagtcctttccaatcatgttagagaaatggattccagtgtttgcaagtgaccccttatcctgtcttttaaagaaaatagcatatattgtaggctccccttatctgcatttttgctttccacagtttcagttacccacgatcaactgcagtccaaaaataagatattttgtgagagagagaaagactatattcgtataacttttattatagtatattgttatcattgttctattttattattattattgtaaatctcttaccgtgcctaatttataaattaaacttaacataggtctgaatgtataggaaaaacatagtatacatactatatatagtaagtggagagcacaccaaatgtatatcatttttgtactgtagtaaatttgaaaaattgtaggtcaacccattataagttgaggatggaaggtctgtctatagggttcagtattacatgtggtttcaggcatccattagtggtcctgatgtgtcctctacagacaaagggggactactgtaagtttgtaaaaccactgaacaaggagtttcaaatgtgataaaatattaaaatgggactcttcaagttcagctgaagccacaattaataggaatcaactggtcgcacattccaagatgagatgctagatcaccccagcaggacctgcaagagttctaaaatttggatcgtgtcattgcctgagctttcagacattagataagtcaagtcagatttgatccttagttttttcctttgtcaagtgggaacagttattgctacccagtgaccttgtagggatgtgtcaattgagatgctggacctgaagatgccatgaaaattcgaggtagtggttctctttctccttcttgcagtggggttttgggtcacaaaatgacaggattgtcctcagatactttatagaaagccattggtgctgttaacacagtatgagtttagtgtttcattttggagtcaaacacactttatttttttttctcacaactgcttctgtgaatctacttgcagggctagatcttctgccctggaatcatatcctagctagtgctcagagcctgccactcactctttggtagtaataactcctctcattggttacctgagtttccaaacagtgttggttatgctataaataagtatagtctagggtaataatcaaaactctgaaattcatccatgggtaatgcatcttctggcaccatcaagagcttgctacagggggagaagtgggctgagtaacttctttctcctttattcttccatatgctaggtgagttggataggggaagagaagagaagtaggagccaggatcaaatttgcttggctggtcccaacctggtattgatttgcttttctactggcagatgcttaagactggcctttcttctctgaaagctgtttcatgatttggacgcttatcactagggtcctcttttttgtgggtgattctcttttgatgataaatgaatcatctagggacttctctctgctgaggtctccttgcctctaacaaggcaaggtccaagactagctcagggtgctttgtcttgtacttggcacttacctcctccctggaaatatggatctttgacctaaaagtgttgtatagttatgtccccaaattgaatctgttttgtttagccacctagtgagcagctttagccatagtctttctttcactcattaactttcttagacttatgtaagatgggtatcagttcactgtgacccttaaaatgcaggggcacctaccaagccatctgagtacactaccaaagtccctctcatttgctagaaataaagggagtaccatagccctgatacttttccactggagggaagcattgcaagtacacttgaaaattctctttgaagaaatccttgccgggcacagtggctcacacctgtaatcccagcactttgggaggctgagcggggcagatcatctgagatcaggagtttgagaccagcttggccaacatggtgaaaccccatctctactaaaaatacaaaaattagccaggcatggtggcaggtgcctgaaataccagctacttgggaggctgaggcaggagaatcacttgaaccgaggaggcagaggaatgcagtgagccgagatcacatcattgcactccagcctgggtgacagagacagacttcatctcaaaaataaaataaaataaaaaataaaataaaataaaaagaaatccttaattcccaattctaagctcctctgatagtatattcagcatcttttttatgctatgcagagatgtactcagctaaggggtgcagacctgggtcttagacatctcctttgcaggtcctgctggggtgatacagtacctcatcttgcaatatgggaccagttgattcctattattttgtggcttcagctgaacttgaagggtcccattttaacattgtgttatatttatatcagcttaccccaaactgtagtctatggaacactgcttcagaaaagggttccattttttttaaaaagggtccttatcaagtgtatttgggaaatatatgtaagatttccagctcttcaggtgctcattgcatataagcctatcgaagaccatgtggaatctagcatgaggagtggtgtttgaccctttccaaacccagtgtttctcaaatatatttaaccacacaatttattaacatggtgtctctttgtttgcattttgggagatgctgctgtagatggttgctggtgatgcttccattgggtttagctaagaatgtccatacattcttccaaagttttcctaaataaaaaagcttaattccttcttagtagaaatgggctcattttaagatgagtatctgttttggaaatagtccatcagcattggcgatgtgaggaaaaaaagagtaatgagtaggcttgttgccttgcttattgcaaacagcaaaaaataaaagataagattataataatatttatatgtatcatagtaatattgattattatgatacaactcattataataggagtttgtagtatcctggtattctgtctggactttgagagcttagcttcaatgaactataaagggaaagtcatagttaattattctcacctggacaagatattgttatctcctgtgttttttaagtcactaccatcagttgcattggttttgagtcttcccaaatgtgtctacctttgggaaggcccaattggccagttcctagacagtttttttttatgtacacagctcattttcacatatggatcataacttcccaggctatcctagcatagcctatcccatctatcccctcattgtgtttcaatgataagatgatgggctttatagttcttttctgtttcaaactttgcaagtatttattctgaataacattagagtctcactagcatgaaaaactgtcctggtttgcctgggactgtcctggctttagtactcagagtcccacattctggaatcctctctccaaaatgcaaaatgtcttggttttcaatagtggatggcaaagcttggaaaaatacaaagcccatatgtcagcccaaaatataggtgctgaaagcaatgctgttttagtgtcaaataggtacagcatagattatctatcttccatagttattgttactattcacccctcccatgttgacaatcatgatttgcagttcacactaacggatcattcattattgtttcactccaattgatgaaactcaagtgtacaccataactacattgtaagttgagtgttaaaagtccatctgtctttgactttgtctttatattaacttgttgtgctttgtatcaagataatgccagtttaatttttaactttatgaatattgtgaccatattctctaagagttcagatagtgaaaatgaagatgattattataccaatgccagcatcctagaaaaagaaggttagatggttgctattttaatggcagatgaaaggactcatacgtctggattgggcagataaataatcaaaacagagcatactgcacaagatgcagaaaagaagatataaaagtgcatagggagactgaatcccacaattttggcatgaggtagacaagtacttctgagtcaatcaaaagtttcttgtctcccaagaagacaccaacgctcagttgaatatagcagccactgaattatcttgagtatacgacacaaataagcagcgtcattgcattattcccttgattgctttctgaaactgattaaaattatatttcctgattcacaggttgcagttaaagtgccctaggcatgaacagcaggggaagttttgggtaacatgtgctggccctctatgtagcagagttaattctgttagatttgaacaacaactctagtatatcaagaaattcttgaatcatggcaataagataatgttccctttagctctttagtacttgaacttgataaatggagattcagaatgtcttttggatttttataaagattttaatgaaactgtagaaacataaaacaaaagattactgataacttgtctaaaaacaagctagatttagctcatctatctgcatgtgtggcaggcagtgcaaatgtaaattttggtaaacttcattcagtgtgtaaatttcttaacaaagaaaagaaaaagatttcaactgctaaaagttcagtatactttttctgcaaggatgctaaaaaaaatgggatttgcttacctgtgatattgaggctttttctaaaactctctgatgatctttgaagaagccataaggagcctagaaaaggacaactgactatacccaagttgttggatgttatgtgtaggatgtgacagaaactcatacagaaaaaaaggacttatgttttggaaataagcctgtttcaaatgaaaaaaaaaaatatgttaccagaggactgccaggttaggccaatctttctcagtttttcaatttctttaataaaactgtcacttacttggaatctggctttgatttcacaagtttgaattacttctgtgctttaaaaccattttacctgccaaagaaaagttttgcttatgatgacatccaaaatgcttcgtagtgttttaaaaatgatcaacatattggacatggataacctatatgactagtttatagatgcagtggatctgactgacaaactgctggtccatcaaagcaggcatgtggatacaaagtggatgaacatttttggagagctagaaattaatccctacaagtcttaaatcctgatgttactagtaagtaaacttctaagtgttccatgctgaattttttttttttttttcggggggagaggatatttgacttggtggagtcataccaatacagtgtaaagtgggcttgataaagagcatagtctaaagttaaatcaagttttacatttgactatattcatttagttttaacactacagaaaagaatagaagtgtgttgtaatggttgaaagcagtttaaagaactattactggaaaaggaaacagagagtaagaatatcctgctgtatcatgctgtatcacaggacagatggaaacgtgtcatagtttttgggttttttttaatagacatgagggtacaagtacattattattacatggttttattgaatagtgatgaagagtgggcttttagtgtaaccaacacccaaatagtgtatatcattcccaataggtaatttctcatcccttacccctcagccacccctccaccttttggagcctccagtgtctattattccattttgtatatctatgcgtatacattatttagctcccacttatgagtgaaaacatgcagcatttgacattctgagttatttaactttagataatggcatctagtttcacccgtgttgctgcagaaaacataatttcattcattttagggctaagtagtattccataatatatacatatatatcatgcctctctatctacctatctatacatacatacaaacatacacacacactactatagatacacacacacagcacattttctttatccagtcatctgtggatggacacctagattgattttataactttactattgtgaatagtactgtgataaacatacaagtgcaggcaactttttaatataattttttttcctttgggtagatatgcaggagtggaattgctggatttaatggtagttctatttttaattctttaagaaatagccatactattttccataaaggttgtactttcattcccaccagtagggtataagcattcacattcctgtttctccacattcttgccaacatctgttgtattttgactttttaataatagccattctgactggtatatgatggcatctcattgtggttttaatttacatttctctgatggttagtaatgttgagcattttttcaaatgtttgttgggcacttggaagtcttttttttttttttttttttttttttttttttttttttgagacgtagtctcgctctgttgcccaggctggagtgcaatggcgcgatctccgctcactggaagctccaccacctgggttcacaccattctcctgcctcagcctcctgagtagctgggactacaagtgcctgccaccacacctggctaattttttgtatgtttagtagagacagggtttcaccgtgttagccaatatggtctcaatctcctgacctcatgatctgcccacctcggcctcccaaagtgctgggattacaggtgtgagccaccacacccagccgtatgtcttcttttgagaatgtctgttcatatcctttgcctaccttttaatggggttatttattttgtttttcttgttgagttgtttgagttccttgcagattctggatattagccctttgttggatgcatagtttacagatattttcctccattctgtagattatctgtttactttgttgattatttctttgctatgcagaagctttttaattaaatcccattagtctgtttttgtttttgttgcatttgatttggggctcttagttacaaattctttgcctaggccaatgtcagaagagtttttgctaagttttcttctagggttttaatagtttgaggtctttattccatcttgagttaatttttgtatctggtgagacatatgggtccagtttcattctttcgcatatggctacccaattttcccagcaccatttattaaatatgatgtcctttctccagtatatgttttgtcaactttgttggagatcagttgcttgtagatatgtggcactatgtctgggttttctgttctgttgcattgattgatgtgtctatttttataccaatatcagactgttttggtttcaattgttttgtagtataatttgaagtcaggtaatgtgatgcctccagcttttttctttttgcttaggattgctttagctattcagtttcttttttggttccatctgaattttaggattattttctctatttctggggaaaataatattggtgattcggattcgataggaattgcattgaatctgaatattcctttgggtagtttggtcattttaacaatatttgactttttaatccatgggcatgggatgttttttctatttgtttgtgtcatctgtgatttttttcatcagtgttttgtagttctttttgttagagatcttttaccttcttggttaaatgtatttctaggtattttacttttttatagctattgtaaatgggattgacttttgtattttgttctgagtttgattatttttggtgtatagaaatgctactgatttttgtaggttgaatttttattctgaactttactgaagtcagttatcaaatctaggagtcttttggaggagtcgttaaagttttctaggtatcagatcatatcatcagaaaacagagataatttgacttcctctttcccaatttggatgccttttatttatttcttttgcctgattactctagctaggacttccagtactagaataggagtggtgaaagtggcatccttgtttagtcccagttcttagggggaatgctttcaatttctcctcattcagtatgatgatggctgtaagtttgttgtatatgtcttttattattttgaggtatgttccttctatttctagtttgttgagggttttaatcatgaagagatgctgaattttattgactgttttttttctacgtctattgagataatcatatggcttttgtttttatttgtgcttatgtggtgaatcacatttattgatttgcatatgttgcaaatccctggaataaaacccacttgattatgatatattatgtttttgatgtgctacttaattcaatttgctgctattttgttaaggatttttgcatctatgtacatcaggagtattggtgtgtcttttcttttctctctttttctttttttttcttttttttttttttttgagacgatgtcttgctctgtctcccacgctggagtgcagtggcgccattttggctcactgcaacctctgcttccccggttcaaacaattcttctgcctcagtctcccgggtagctggtattacaggcatgcgccaccacgctcagctactttttatatttttagtagagattgggtttcaccatgttggccaggctggtctcagactcctgacctcaggtgatccacccacctcggcctcccaaagtgctgagattacaggcgtgagccactgtgcctggccttctttgtgtgtgtgtgtgtgtgtgtgtgtgtgtgtgtgtgtgtgtccttgcctggctttggtatcagggtgatattggctttatagaatgagttagggaggagtccttcctcctcaattttttggaatactttcactacgattggtgccagttcctagaatgtgtggtagaattctgctgtgaatctgtctggtcgtgggcattttttgtgattgttaggagattttttactactgattcaatctcactacttgttattggtttattcagggtttctattttttcctggttcaattttgggggttatatatttatcgatttcctataggttttctaatttgtatgcatagaaatgcccatagtagtcttttatgagcttttgtatttctgtggtttcaattgtaatgtgttctttatcacttctgattgtgcttatttgacttttctctcttttttcttgtttagctagcagtttatcaattttgtttatcttttcaaaaaaacgactttttgttttatcgatactttgtgttgttttttgattttaattttatttcgttctgctctgatctttgttatgtattttcttctgctagctttgggtttggtttgttcttgtttttgtagtttcttgatgcgtgaccttagactgttaatttttgatctatcttttgaatataggcatttaatgccataaactttcctcttagcaccacgtttgctgtattctagaggttttggtttgttgtgtcactgttttcatttgtttcaaaaaattttttaattcttgccttaattttgtcattgatccaaagatcattcagaagcaagttgtttcatttccacatacttgtataattttgagagtttctcttggtatcgacttatagttttattctactgtggtccaataaaatacttggtatgaatttgagtttttaaaacttattgagacttgttttatggcctaaaatgtctattttggagaatattccatgcgtagatgagaagaatgtatattctgtggttgttgggtagaatgttctgtaaatatctgttaggttgatttgatctagagttcaatttaagttcaaagtttctttgttgattttctgcctccatgtcattgttatttttcattatttataggtaatatctgtttctaatgttattttcattttctttttaaaaagtcttatgtttgtgtatcttaagaatatacataatataggccaggcatgatggctcacacctgtaatcccagcactttgggaggccgaggcaggcggatcacaaggtcaggagatcgagaccatcctggctaacatggtgaaaccccatctctactaaaaatacaaaaaattagtcgggcgtggtggcgggcgcctgtagtctcagctactcaggttgctgaggcaggagaatggtgtaaacccaggaggtggagcttgcagtgagccgagattgcaccactgcactccagcctgggcgacagagcaagactccacttcataaaaaaaaaaaaaaaaaaaaagaggaatatacataatatagcctataaatttaaatatccaataaagtgcttaaaaagtgttaaaacaaattgctttatcagaggacagaaacattactgtaatatttttctcacacatattatttgtttagttagtcctactattaattaatgttaattgccactgttaacaacctatttttatttaaataataaaatgcatgtagctgaaaggtaaatactatagaataataaataatttcaaataaaaccttatttttaacatttttgtgttaaaatactaatgtatgtatgtattagtaattaattattgtaaatttttatctttgcttttttttttttttttttggcttggaatggctgtaccctaggttactctaatggtcaccagggtacttttcccaagcccgtaatgttttaagacaagcaagcaaatctaattctcattaattgcctcttacctggtataagtaacctctcacattggacactgactgtaaaaggagttactattacattatccttatcaattatctgtgacagtggagccagtaattctcaaaacatttgtacgtcatttaggactctttttaaagtaaattacatttactttaaaatgtaatttatttgatatttggtatcttcaattttttgttggtgctaattgaaaaaaggagaattgacaatagtccatatatatcaccaatacctgtacatatctggtaattggctggggactgaaacttcttttaaatccagtagttagaaaatgatgcttatattttcataattgtgccctgtatttaccatctcgcaataatccataagagttttctggtattccaagcccttgtggagtgtccctttcttatcactaactaccctctcctcacatggaagtagacatataccctcatatccggtaagcatctccgtgcttacaaaagaatatcccactcctttagctctttggctcctttcttattcctacctatacttcaaagccccttgaaaatgccctccactttacaaaactttcttcagaccatttttctaacctacactcctgtgtaccacatgccttactactcagctaccatcttgtattgtcctgtgaagtctcatctgttctcttcttggatggattgagaagtagagatcatggcttattcttcccttgtatccacccagaatactagaacaaggctaggcaggttgtaattgttcaaaaaagaccatcaattggtttttataaatgatgagtcctgcaacacatgacatggaagtaggcaaataataatatatcttctcatagaaacgttgtccatcatgtttaacagcacgtgaaagcacattgttgcaatggaaaaataagtgaagacaggaaaaaatgaccatagtaaccctgactcctgggctaagattttagttaataccgtactacttctgggtagagactctagattatttaaaacacatagacacactcacatgcacacattcttacgcacatgtacacacacaagcacacaaagaatgggggtttggccttgacatacttttagaatttgataccagtactttttaacagcatggtctaaagttggaaaaataggaattcagtgtctagttgagttatgagttgagaatgaatttcacaacaaacctcgatgattttccaccaacaacaccaacccaaagacaatcacttggtggccatcgtattgcaaaagaagcagagcacagacatgctgtctgtttcacttaaatttatgagaacctgctgaaagggaatgtagaaagtaaacgacccatggtaaagcattgtgaatgaagggagaggtgctgtggttagctgggttgctcaattcctcagattctcaaagccaggagaaaatttatcctcttccactgagacataaactaaactccttttggccattaatctgcaaagttgatgcctgccatggtaattcatcagacatttttgtggggtgagtctggtggggcctctggggcatctgcctttgaaattcaaagaacagctttgtcccctggggacagagtgactttcttccctcattgcacatctggaaggggagtttctgctcccactctcccccaagccaaggcagggcctgaaagagctgccatcttcatgaagcatgtacttgtacctcacttttctgatcactctacccagactgtcagacgaagagaaggaagagaaatacagccagcacactgtttgtaagtgcctttttcccattacagttcagcacagagaaaggacaattactgtttttagtgggttttataggagccacagtcactgcactaaccattgtgaaaaatgagcagaattctcaagctacatgtctcaatcatctgcacataaattgggcaatggttttggaatcttggggtctaatctgaatttacaagtgtgtctccaggcccagtgacaaatacatgatctgaagacagcgggcattactatgaagaacatagccttgggtgctgggctcatcttttgccccttcagtaacaggcacctgccaatgccttggtctcttagctggaggtttctcctgaaccttccagtccttaagtgaactggccgtgttttctctacaggctcctggtcctctgtcctccagctctgcaccacactccagacacagtggttacctttcagttttttgagtacaccaatgtcttttcttttttttttttttttttttttttttgagacggagtctcgctctgtcgcccaggccggactgcggactgcagtggcgcaatctcggctcactgcaagctccgcttcccgggttcacgccattctcctgcctcagcctcccgagtagctgggactacaggcgcccgccaccacgcccggctaattttttgtatttttagtagagacggggtttcaccttgttagccaggatggtctcgatctcctgacctcatgatccacccgactcggcctcccaaagtgctgggattacaggcgtgagccaccgcgcccggcccaccaatgtcttttctacatagaactatccaccctgactagaaggccctgccgtacaatctttgtgatattggcttcttttgacattgaggtttcagcttgaatgtcatctcctcagagaggtcttctgagaccactcagtttaaaggagccacaaccagctacccaccagtcactttccatcatttgtcagtgtgtcactttccttgtgacatttactgatacctgccatttttttttctctctctcttctctttctctctccagccctctttctctctctctccccctttccatcccacttctacctctatgaaatagtaaactcccaaagagcatggtccttaatctgtcctgttcactgtgctatgtccataggatgtgttcagtcattcttgctgaatgaatggtttccctgttctttgggtgtttgactgagggtagcatgacatttacagtaaagtttatgtcatttttcatattaaaaaacatgcttggatcaacatcttttaggtagaattcactcttatacatttatctattaaccaatgtattcatttattcattcaattgatatttgttatctactatatgccagataccttggcgagatgttacagatgtcagagaagtttcggccagggaaatgatataaagaaatggagagagacacatgtgaaaacaaaatttcatattttataccgaatgttatatccagacctgtctgtctaatatccaattttctttttctagctaaactgctatctttctgctccaactgtctgctctccagtaaggctctttcttcattaccccacaattggacctcatcttcacttatgttattactttattctagactgtcttctctctgctgttttctttgaggccagttcaggactttccgtcccaggaaggtttccacaactctgtgagctcccatttgtcccctgagctgttctctttagtacgtaaagtctagacccttcaaaaatttagagctttgtactgatgatgattttgcttggatttgtatttcttccacatgtgttaatattgaaaacccaactcaattctatcttctttgagaaagcagccatgttttataattcttctaggtctctgccaatatcacaggtagtatagggaacataatagcagtcaataaattcttactgattgattggtgtcgaaattgggttgtcagttccagacggcatgctgaatgagagcaggtctgggaaaagcctcttcagcattcagcctccctgtagatcaagtacaggcaaagcttatggcaaaaggtggtgaaaggcaaaattccaatagcaagagtattattaatctacttaaggcattaagtgttgtccagtattagattggaccggaaatcctggttttcaactctttcccatttgaatgcccaagaggctgtcagtgagtgagaggaaatacggaattggctttcagttgcccgaggagaggagcttaaattcctagatttatggctctactttacctgaaacttttattttgcttttacttttatgtaccaatcgagtgtactctatttctgttggtgcttcctaaacagtctaagggagctctaaaaataagtaccaaccaatttatacagtaatgttcatagcgttgtttacagaatgcctcatcacaggtcggtatcctgggagaccccaaaaggtatgatactttcagagaggggccttagtgaaggaggtatagtttgcagtatgaatggtctgtctgtgatctctgaactcaattattctggtttttcaaaatctagtagtagtaaaagaagcaggcagagtgtagtagtcttgtgtcccgaatctctttactaacatgccatcttgctgcttctgtttggcctgattttcctcatcatgctctacatttctggaagtcctttggtcttccttctgttgaagttttctagctccttcatatcccaccttatcctcatttcctggagtgaactctttcttctttgactctctatagcactcaggtgcttcttcattcatttgctgcttattaaaattgccatttaatgtgtatgcatcttgttttcttaagttgactttaacctattgtttggcaggaactttgtctcatacttcttaatatctccagagtgcccatagtaaatgctcaataaatatttgctgctaatgatatatcttagttgactcatcttgtttctggtaaattttactgtaacaagtagcaatataatgatataacttaaaagaggacaaagaaaatctagagggactttgaacacttgattagaactctaaaagggagaaattctttcagtgttggtcagtaatataaaaattattttgaatgattttatcaacttgacatatctggctattattacaagtgtttgtttatgtgttaatctctcctaaacttgacaaggatagggtcttcttaagcacaaagtctatatattttatatgtccttggctttatttggattaccaagtgagtagagagctgaaaaaatatttattaaatgcataaatgaatgaataaccttcaaatccaaagctagaaattctgttaaagaaaagatttagaccctctatctctcaaagttgcaagttactaatgctgctcacccattttcggttaatactaatagtctgtcttctacatggggaagtttgttggactaaaatgtgataatagggaccataagttgatgcctttgcattggctggtttgggaatagctgttgagaggatacaatgtagtttcttttcagttttatttgtcagccttgatcttggtggaggaacatgttcttaacacctacaagataacaggattgtttaaacattacaatatcacaccccatatttgagttttatgaaaaactgtgaatagggccaatgtcctaatttgtcaaaaatgttaaactaatattgcaattctataaaataaattattgacagattttataacataaaaatgtgtatttttatatatctgtagcattataagcaaaattaaggaaaataagctaggagataatattttaaaatataattaaatattttattcctttattataggaagagcttttacgagttctactgaacaacaacaaaaaatccagtagaaatgttggacaaaagatgtgattatacaaaactagaaatgcaagtaaacataaaaagctcaaacttacttaaaaacttaaaatgaaatattcgtaaataaaactattactgagggcctataaaattttgggttaaaatgaaatggtaatacttaataaatgttagggcacaatgatgctatctttcttacatctttctttttagaagtaacttatttcaatgtttctggaaagcaatttgataatttttatattactacaaaaatatggtagctaccctttggctcaacaattttttagaacacaaaaatgcagtcaaagatgtatataaaagactgaaagtaattcttcatagccttgtttatatgaaggaaaactgaaaacagcctaaatatttaacaataggtgaaatgattagaaatgtggtatattcagagcaggcatagtggctcatgcctataacccagcattttgggaggctgaggtgggcaaatctcttgagcccaggagtttgagaccagcccgggcaatatggcaaaaccctgtctctgcaaaaactataaaaattagctgggcatggtggtgcacgtgcgtgtaatcccagctacttggaaggctgaggcaggaggctagattgagaccaggaggtagaagctgcagcgaggtatgatcatgccgctgcactccagcctgggggacagaatgaaacactgtttcaaaaaaaaaaaaagtggtatattcagatgatcatatattatttaacccacaaaaataagtctttttaaacttaaatttaaattttttaagtgaaagcaagattattaagaaagtaaaggaataaagaatggttattccataggcagagcacaaaaataagttttaaaagagtaccatgagattgtgcttataataacaagtggggaaaagtactaaaagctacatagagcatctcaatttaatggacccacacaagactttgaagaagttcactgaaatatcagcagtggttctcattgcacaataaaacagactgtgagtgatttttttgactgggtcaaacatcattgtcctgtcatctttgtgtgactgagaggctaagtgtcagaacactgtagatatagttagtttgaaggaattcattcattctttgaacgaaaaatgtagtatgtattatgagtctggtaccatgctagatcctgtaacaaggagcttagaatgaaatgtgcgatacagctaggtcagtagatatctatgttctaagtattattgtattaagtgcttggataatatagtaatgaggatgataatgatgatgccatagagaccacttatgtagatcttctagtttctgttgctgtgtaacaagttataccaaaagtttagtaactaaaaccaccgttgtattcagctcatggtttctgtgggtcagggattcagaaagcataaggtaatagctttttctctacatcacaatgtcttcaccctcagctgggaagacatgaatgctagggctgacttgactggaaatgggaatgatctgaagactcatgttcatacattcatctgtttgggctaggaggacccacagatgaggatttctaactgaaatgcctacatactccttgtggcctggcttgcttgtggtttggcagcctcagggtagttggatttacatgaaagtgcaaggtttcatgcccatgcattctagtcagcaaagcagaagctgcatcagaagtttttctgacttattcttggaagtcacacgtacacactgattcaagggaaggggacacggataccaccttctggtgggaggatagtcatgttgaagatcaaatggaattggagatattgtatgtgacttcattatgtgctagacattattcatactgctttctagcaagtagttcatttaatcctcactacaattcatgaggtaagtagtattagcattgcctcctttaaacaagaatctgaagtcatggagctaagtagcttgcctaaggtcacataataagtggcaaagctggacttcaaactcaggcagtctggctccagtgtttatgctcttaatcagtggaggtgatcaggttactagggacatatgcagaagacctgcctaaccctgacacaggacagggagcagggagtagataaaggaaggctcccttgaagaagtgatacctaaactgagttatgaaggattaacagaccctagtttgagacttgaaggactaataaaatggacagtagttagctgggctgtgggtagatggttggaatgggaaaatgcctcatgaagggagaacggcatgtagaaagcccccaggcaagtgagtacggcatattcaggcaattgcaagttgctcctcagtgctagaattcagagctgtggtggcaagtttcgaatggtgaggctggagagattgacaggaataaaattagaagggcccaagcaatccaatgattgcttgatcaccatactgagagatcaccaggatggtgatgttactgaattgactcttctgttttcctcctagcaattagccatgtatttattagcatttgccttttttattgtagtaaaatatataaaacttaaaattcaccatttaaatcatttttaagtgtacagttcagtggcgttaagtaccttcacattgtggtaccacgatgaccaccatccatctccagaatcttttcatcctgcaaaactgaaactccatactcattaaacactaacttcccattcactcctcccctctagaatccaccattctactttctatatctgtgaacttcactactctaagtacctcatataaatgaaattaatattatgtggacttttgtgcttacttatttcgcttagcataatgtcctcaaaattcatccatgcagcagcatgtgtcaaaatttcctttcttttttaggctgaataatatccaattgtatctatatgccacattttgtttattcattcatcttgttgatggtcatttgggctgcttctgccttttatctattatgaatagctctgtacatggatgtacaaatgcttcttaagacctatagataaatctttgagaccttgtttccgattcttctgagtatatatacagatttaaaatggccagattatgtagtaattttatttttaatttcttaaagagttaccatactgttttccatagcagctgtaccattttacaatcctaccaacaatgcacatgattccaattattccacaggctcatcaacatttattattttctgatttttgcttgtttgctcgcttttaaaaatagctatcctaatggatataaggtggtatctcattgtggttttgatttgcctttccccatcttttcatgtgctcattagccatttgtatactttctttggggcaatgtctaagaattgactttttagaatgatccctctggggagaagtaaaagggtagaaggagggtcagaatggaggcagggagatcaggtaggaagttgcactaaactagccaagatgtgataaggcttccatgatgcaactaatgaaattgtatggggcagtggtggtggtagatagcattgaaagattgttttgcaaattaagcagaacaaaaaaaaaaaaaacaagaaaactcaatgttaagtggatgatggcaccatgactggtattcagtcagtatgtacctgtgtagccattctggctgaaatacttccatggcagctcccccaagagtgccccttcattgcccctcccatccaggtcttcaaaatccttaaactgcctgtatgcccccataattccctaaataataatgaatgctgggtacagtagggggtaggggaaccttggactctgctccagctcagtagccagggtccattcagatttgtcagcccccttcccctctgatttactcctggatagcagtaccatttcttgacacatgtactgatgtggaaaagatttttggaaggtatgaagggagttcaccaaaggtgataagttttatttggggcctgtttgtgtattcacgtggagagagttagcattcttggttctagagaaaaagatttaggaattttcaacatatgatagtcatagaacccaagaacttaccatccaatggaaatattttccctctgcagtgacaccattctttcataaaattattcacaatttagcaactatgaacaggaataaaacctctaaccaatattccaaagaggtcagctgtgcctaaaatgcatgttggcagaatgtagtcacattcccagattttaggaagccaggaatccaggaaggagtcttcctctttctgtatagcaacttaagcttatttgaaggtggttgttcactccctcctggagtgcccttagctgcagacaaagagagtgggattcgtgatgatcatttggcatcatgtccctgacagatagcctacaatgttaccagaagctgatgaggcttattttggttttgtttcgttttgtggaaaaccagaagggatctcagtgttgctgcctgcaggataagtaaagataacctactatgtattttattggcaatcctgatagcattttctccattggtggtttatgtgtaatagagaccaaactgcaattttctgacctgccaagatccattatgtctggtaaatatagtttatgcttgacagaatacacacttagggtggaaagccatgcaaattaaactaaggtttaggctaatttttggtagtgaaaattattctcccttggtgaccttattcagcatgaaataaaacaaccagaaagctattcatgcagtccactctttctttaatcaaaataatgaaagctttggatagcccagctcctgattctcatagctcttgtctttcatggagcctaatcttttatggtcataagaagcttttttgcatgaataggttagagattaggtagtaaaatgccttatttaaggtaactgttcttagtctactttgaagtctatgcaaattatatctgtctatggatttatggagactgtatcaccacagagtcttgatctgttaacataaatgatattttaaaaatatttacccattgtctgggctaccaaactttagtcttatgttggaatagtgtctgattgctgacaagctgagcagtagttttgacagagctaaataaggagaaaagccaagctttaataatgttgaccataagttaggaataatctcattgattgcttagtacagctaattctattttctgatgataatttgcattaatatattcagtttatgtagcttagtctccaatattatctcggtaatcccatcttcattcacagtggaacagaaaagacagagttggaaggcttgtaggtcaacgtaacaaacttgttctatctgctggctctcagattcttttcttttaaaatatgtttttaaatcaacagacaaaaattgtatatgtttgtcatgtacaaatgttttgaattatgaatacactgtggaatggctgaaaggggttaaataatacagattgagtatcccttatctgaaatggcactggaagtattttggatttcacattttttgggattttagaatatttgtattatacttaccagctgagcatcccagatctgaaaatcaaaaatccaaaatgctccagtgagcattttttttgagtgtcacattggtgtccaacaagtttcagatttttgagtatttaggatatcagattctcagattggggtgcttaacctgtatgtgcattgtgtcacatagtttattatttttttttgtagtgagaatgctcaaaatatactcttagtaattttcaagaatacaacatattgttataatctatagtcaccctgttgtacaataggtttcttgaacttatttctcctatttaattgaaattttgtatcctttgaccaatatcttcccaacttacttatactcccagcagtccccagtaaccaccattctcctctctgcttcaatgagtttaacttttttaggatccacatataagtgagatcatgtggtatttgtctttctttgccaggcatattttactaaacataatctccaggttcatccatgttgttgcaaatgacaagatgtcctttattaaggctaaatagtagttcattgtgtacaagtacaccacactttcttaatccattcattcattgatggaaccgtagactgattccatactttggttattgtgaataattgctgcataggagtgcagatatctctcctacatactgatttcatttcttttggatacattcatttcttttggtgggattgctaggttatatgtataataactgtatttttaattgaggaatctccatactgttttttaacttacattcccactggtaatgtacatgggttccctttttcccacatccttatgaatacttaccttctagctttttgataatagccattttaacagatgtgaagtgatatctcattttggttttaatttgcattccctgatgattaatggtgttaaacattttttatacacctgttgatcatttgtatgtcttcttttgaaatatgtctgttcaggtcctttgcccatattttaattgggttgtttgcttaataatgagttgtttgagtccttatacatttttttatattaaccccttatcagatgcatggtttgcaaatattttctcccattctgtaggttatcttttcactctgttgactgtttcttttgatgagcagaagctttttagtttgatgtaatcccaattatttatttttgcttttgttgcctatgcttttggggtgacatccaaaaagtcattgcccagactaatgacatggagttttcccctatgtttccttctagtggtttcgctgcttcaggtcttatgttgaagtctttaatccactttgagttgattttattatatggtatgagataagggtctaatttttttcttctgttgtggatattcagttttcccaacattgtttattgaggagaccgtcctttctgcattgtgtgttcttggtacctttgtggaaaaccagttgactgtaaatgtgtggatttatttctgggctttctattctgttccattagtctatgtgtctttatggctttcaaatattgtgagacagaagaacacaggatacaccctcttcacacttgccattaatagcccagtgcagccagaatgaacaaggtgttacagaatgtgatgcaacaacaagggagtgataattttattttaatttaaaaaggcattctcagaaactgaagtttaaataaaccatttgtttaatggctttaatgtggacactagaaggcacaaaggtctgggctattgggattccagtccattttctggaatctttgccttcagagggcataaggtaatcaagtacgtgggaggtaagagtccaaatgttctgtattactctcatctttctgtgaatgaccaaattcttctgcttttcactggcaatcatatattttgtcaacttgtgaaaaaatactctacaaagatgaaaattgaccttataaagattcttcacatgtatcacatttgagaaggttgtgttcctgactgaagaatcttgccttggtttgttgactctggggttacactgtgtccagttatggctccttggatgaaggccctgtgttgtttttgagtcagctcactcagctttctggagggcagttgattccatgaaaatacttgtctatgtgatcaagcagtgggggctgaatgtgtggctcttcacaacagaatgcaaggcggattactactattcctacagtgctactgttattattaattttaaaaacatacaatgtcattatcaaccttgatctgctctgcttttgtattttagtaattgattggatgagaatgtgcccaggcatgctttaatcactggaagggcaccagggtttaatcttccaaaggggtttttcccattgttatttcctgaaacatgcttgccattactcaagtggcatacaaaataaaattcaaatcaaaacagcaaaagagatgtgatccctctcttttgtgccttcttttaggcttaattctcataagtagaacatatctaagaagagtaggcttttgagttccaggcatactacttctaaactcttcacttaaagctagcacattcacctgaccttgaaaaggtgaatagatacacactgctgagattaaataaggcaccacagaagaataactacaggaggagcaagtaagtgcaataccctcttgtatgaagtgtgaccaacctgaattaaaccatatttctagtcctccctcagctccaaacttttcagagcttttgctcaatgactccaccccattgtatccttggctgactctcataattgcctcattattatattttctatataatatgcatctttggattcatagcccaacaatctcagctggttctcctctgtagtttgtttagcagacaattgtagtcattgcccctcagcccatacaacatgggggatctggatggaaatgaaacgcagacttggctcatcagagggcagcttggcttcacttgtatgccacaaacattgtcacctcataacactgacagtagtcactgatgagcacatttgaacccattcccaaaagtgcattgcctccacaccacatgaattagagccatttgtgttattttgcttatgtgttctttttcttttctctgttgtgtattcagattcccatattagttttccttaatctaagacttacattagatgactctagccagactgtcaaattatttgagaactctctttgtagctctaaatctagggtagtacctggtagtcaataattatttatcaaatgaatggatatttttcaacacttactggcaatcaagaaataattgtatttctaaaacagtgtgaaaacacgatgaattgaattgaattggcgagaatagaatataaactgcataactgtaagagatagtactatacaatagtgctgatgacattttgttttgctttattttattttatttattttctggggctgcctgatacaaaaagttccttgtgaaaagagaagattggaatccaattagtagattggaattgatgagttagttaagggctttagcatcctaccatgggctgtggtttttccccctgaacctatgggcatgttttgattgaagatgatggctggaagctgccacgtttgaagggctagagaaagagcctgggtttcctgtgtcagatgatacaaactagaaactagaaacgctacatggtagggaggcagtgggggacagaagaaaagacatcattattctttgtctcttcttttccctgggggaaatgttggcatccaaatattcaacagtaggttgacatgtggaaagtggcctagccaaaggatctgtggtgatcgggagtcataaatcagatatgagagggagagaccatatggtgcagaaagaaagtgacgatgcgattctttcagctatagccactcacgtgcactctcttacccagtagagagaggggcccctttccactgtttcttttctacttccccagtgaacctgcaggaatgtcagctgaaataccttgctcttttctacacatttctgaatcagccaagatgtcagtgacctggaaaggactcaggtgagagccagagaaatgattaaagagccggtgatgccgatgatccagtgggtgtctcctctccgcaccactagaactgacttatgggaagatagtcaaataactagatatgtgttgtttggcccagggcagacaagaaggaaggtatggggtaacttgtctccaatggagttgccaacagccaatgaattattgtgtcttttcctctccaaatggactgtcagtatacatatatatattttcaagttttattgaaaatagttacctcaaatttacttgcacttattttcctgagagtctgaggaatcacattctcattgctgcaggcccccagaagttttgaaacagcctctgccacgccacgcaactctactcacccagagaaattgccttccctcttttccctcaacttgtctggagatgaaaaggatgagattgaaaccccttttcttagagacacgtcccctcccttgctggtttctggcttctcttttcggtgtgtgagcaaaatcattttattaaaccatttgtcagggggcagatgggaagtctgtctttcccattagttagcagaaagtgaccccagcagctgtggagggaatcggtcaagccattgctaccaaccagaccagggtggagaaggaggccgggctttgctcagttgtcacaaggtcccaggcggctccccaggagccttggaactgatgaggccctgtttttattggccatgcctgtggtaggctgacttccttcactctgagcttcaggccagccagggaagggggcaggggccactagcattgggaagctttcgtactttgcccttaacactccatatccctgtttaattaatttcctaactttgtgggggaaaaagatgaaataaataaggccaactgaccacttcataatttgtttctgaagcttggctggacataaaagtctcccttccaaaaccacacggcataatttattttacgattccctctcggcaccaggtctgggctaaccttgagtttggaggctgtgccttcgcttcctggtgctggtggtcacagtgtgtcctttcttggcagtggccatgggcccagcaaaacagacctctgaaaggcgagcagattaatcattttgaaggcatgctcgcctcaacagttcccctgcaggatgtcggagaaccggagagaggggactgctgtagttcacaaggggcatagggaaatgcctgaagactcacaaaaacaagggggtgaacaacagaaaaagaatgagtgcttttaaattgtacatgctggagttttcactaaccgaaaagtattaccaaaaaatatattgccactcctagagcacaaactgtgatgagtccaacccttttattacaatcaggctttctctaaatatattatgccctgcaggtcaaaatgatttacttctctattttgggacatctgagttctattctactgttgccagtatgttttcagctgtgccagaaccgagcaggtctgcggctcctttgtaacatcaaaacggagacatttatcattgagatttatcatgggacagcctgccagatggtttgggtattttaaaggtgaactgtttgggccttgattagctcatgcggacttctagctaaagacaactctatcagctgctcagtggaaagacactgacgtccccctccccccagctccctccctctgttcttctagtaatgcagaaaatattaatgtaatggcagatgtggcatagattgtcatttcaggaagaaaaccaagccataaccaattccactgattgcattctaattataatgtgacctcctgttgctttgcatagaggcagtattcatttcagtacaccactgtaaaacttgcctagtcaacgaccctcaaaggggcaattgtaagatttaagcttggatttttttgctcataccaaagtcctttattctgccaagcctctgctgattgggccagaaagaatgcatttgattatatagactaaacttattgggaacagaacctctgtgctttgaaatgcttttcattcaaattacattcagacattcaatcaacattgattatgatatggattggcaacagggaatgccttgggtttttggtctggcttgaaagtttgctgagtttcgtaccagataacaactgggaagccagctgagtttccttaaccttttccatgagtttctcagaaaaggatggtttctcttgggaggccaggagttccttattcccacttgatgcagtattccaagatcatttcttcacttggaaaatttgggtctttggggcttccaaatttaattaacctctgatagctttgggaaatgtgtgctcatttgtgtttatgttaataaagtaggtccttgactttgtgcatgaaaatctaggagaatgcatcttagattcagattccaggtctaaaattttgtatcatggaagaaagtgatcatcactaattctggtcatagatgttgtctgtgtgatttagagcaaggctcagttttctcatctgcaaaatgaaataaaggtgatcccaaggtttaatttctaataaagttgatttgaaaatactaagaaacaatataatattgttattattatttacatgtcagtgtatgtgcttgtgtttttgaggggcctttgcctgcatctagacctctctgtctctggaaaaatcctggtgggatcagttttcgaagtagttggctcttggcagactcgcagacatactaaagtttttgttttgacttgaaggtcctcttccggcccttctgaataactttaacctaaaagtcaggctagaattcccacaagaagagagttgccagggcatcctcattccaagctataaaatcactggagatagctccattttctttatccaatcacatgccatgagctgtcatttgtgtacagatgtctctcaaatatagatttccagccttcatagcattcctgaaatttagcattgctaagtatatggtcaccttgaatagtattctaggatctcgaattcagtacgttctctttttccccccaaaacaatggcaaccagcctctcctctgttctctctttctcttaactgctcctgtagttccagttactagagttcaaaaccttggaacttttattttctcccttgtctttacttcccacatagaactagttgccaagtcctgtgaattataccacttgaaaatatctgttcttcctaaagttagtgctttttcattgagtctaatcatttccttcatggcctgtgtaatttagtctttccaccaatccagtcatcctaccatgatgtggcagcagcttctaagatggtccttataatatctgttatctggtgttcatacccttgtgagatctcctccccttatgtgtggatgggacctgtgatttgcttgtaaccagcagattatcgaaaaaagtaatgggatgtcactttcatgattaagtgacataggattgtgacttctgccttagtagaaaacttttttcctgctgatcttgatgaagtaagaagctatgttggagaggcccacacggcagcagcagagggtggcctctggccaacagccagtaaggaactatggccctctacccaagaccccacaagaaactgaatcctgtcaacaatcttttgagcttggaagcttccccagttaagcctcagatgagaccccagccctggtctgtaccttgataacagtcttgtgagatgcctaaaacagaggacacagctaagctgtatccagattcctgacccacagaaagtgtgagacaacaaatatgtattattttaagctgttagatttgtggtaatttgttacctaatattagacagctgtatcctagagcagctagattactgcctgacaatatcagtcttttgctcagaaatactcagtgtcttcatgattctttgtctttggccttgaactccctattcaagctgttttccaattctccttcctgagcacaattacctctgtactgttcatatttctggctttctgccttttaccttttgctgacatcgttaccatttcctggattttctttatgactaaatctcacatcttttttaaaggcccacttaaatgtcacctctttcataaaagcttttttgatctctgaagctatatagatctctgagctgccatcgttctatacctcaggttcctattcattttctacctcataggggactggtttgagaacattgctgtatctgtactacaggttgaataccccttatcaaaaatacttcaggtcagaagtgttgagaatttggggttttgggggagattttggaatatctgcattatatgcttacctgttgagcatccccagtctgaaaatccaaaatgctcatttgagcatttcctttgagggtcatgttggtacataaaacattttgggtttcggagcattttggattttggattttcagcttagggatactcaacctgtgctaggctgcaaattatatgaaggaggcttcttctgattcatctttccatgcccttgagcttccaatataatgacttaatggatggtatgctctcagtggatgagactcaatggatggtatgctccagtgactcaatggatggtatgttcttgttcatgaagagcaagccagtgtgcccacaggacagcaaaacagaagtggtttgtggaactattcgtttatttacttgcttattcttttattccttcctttaccgcatacctggcattgtcctaggggctgatgtggactcatgggcatcatgcttagaaagggaccttgttcttggggttttatgtttaagcatcaccatcttcttgagactcttaatcattttatttttgaatctgtgttttctgagtgaagtcccagaaggtagtggggtatatgctaggggctcagagaatttgccagtgccttctgcctccctgacatagattctaacccacttgttctcctcaccctcccaccatggcagaggcctgggcacaaccacagggagagttggggttgggtacacatgccctgtattccaggtcacagagtaaggaccctgggtacctgggaggatctgtacttgctgcatagtcaggaagtaactatgtaagtatcatattaaataagaaatactatgacaggttgagagaaagagaggagagcattagtgagcttacagacaaacaggaaaagcttttctcttgccttttgaacaagtgcctgcattttcatttgtactggaccctggaaattatgtagctggccctgactaggggtatagtgggaaaccaaaggggcagggatacagctgtggcagcagaggtggggtcgggggaaacagcaaacaacagacaataaacaagatgatttcagaaagtcataagtactatgactttctgagaatcaaatgaggtgatatgctggtgagtccctgagtatggtgcaggaagcatgttaccttaaagaaagatgatgagggaaccgttgctgagaaggtggcatttgagtggacatctgcaggaggtaaagaggttaggccgttccaggaatatggggcagtttctaggcagaataatgtgctaggtcaaaatccttggggctggaacaagcttgaaatagccaagagctagacacaaaagccagtgctgcagtagcctagagactgtggaagagaggaggcttggggcatttactaaggtaagatgaagctgatcctttattttattttattgttctttttttagaattaggttcttgctgtgtcacccaggctagagtgcagtggtgggatcatggctcactgcagcctcaaactcctggatcaagcaatcctcccactttagccttctgagtagctgggactacaggcgtgtgtcaccactcctggctaatttttaatctttttttgtagaggtagggtctaggtatgttgcactggctggtctccaacttctggccccaggcaatcctcccgccttgatcaccataagtgctgggattacaggcaggagccactgtgcatggtccagctggttctttaacaccaacaccatactggccatagtgaggacacagcttgcctctgggcttgtctaggtctgtagtccagtattttcacacctaagaattactaaggagggattttacagcaatgcgctccctgcattttctaccttaatttaattcctttttctttgtcaacatagctattctgcattctttaaaatagagattttttcagagacatgtaacttacaaggatgtaaataatcataggtgggccaaggaatgtgtagttcctagggagagctttgcaaatgagattggttcctttcccacagaacctcaaggactgttggatttgtttcagaggtcacaaatgggcaccttatggcccaaactggagccccagaagtgttttatttgttctgcatgttgcccttcatcaaacaggagtgccccagcaatggccctgtgctccccagatagctctgtcctaatctctcctatagtctcctgcttgtgcttcttccctttatgcctgaactctttttaattgtttctcattaaaaaaattatactccactgtatagtgcagacgtggaaatgttggcatgtggatagaccctgtaccaaaaacccagcagaagattcagagtccctgagatgcttcctcctcatcttcttcgccaagcacctcttgtcactgatcttggaagttagaggtgggaaaaggcaggtaagagggccaagaagtcaaagtcctaattcatgcatgcctgggcccacccgtcttcccgtcttgcatgcccattctgtggactccctatatgtagatgctaacccaggaaacccctcagggccagtggtgcatggctggctcccttcctacagactgttcctttaaaaatttggggctttaactgagaagaaaattaagtaattttgttattttttccttcataaagctaaaattattaatcttcagagataagtactgttcagtgcataatgagttcgaattgttgataattataattttgaagagtttcagcttgctgtcagccaagtaattaaaggggtgggaccagggttctattttgttcatgatggttatgcttctggtaagaactctctctgtgtggcaaaaatgccctcattctagtcacatggtgcagtgaaagggttaattaaatcaagtaaagtaatccactgggttgtgaagagttctcttttcctagtttcccccctggccttccatctcttccttaagatcttcccattgtcttagcaaagctggacaccctcaatggtgcccgctctccactagtgaaacagatgcaggatgcctgggtcctgcctgagcccagggaagaggctcagttcctttccctctttcgcaactgcccccttcacccaattgcccatgagtcaccttaaaaaaaaatgtcttgcatatactagcactggactaaaaaaattgaaccaaaagaaaagaggaagagaaaatggaaaactaatgattcaagaaatcacatagcacgagataattctattttgaaatcacagcagtggcacccagaggcggacactccccaaattactagtgaaaaccctttgatgtatccagttgtaagaaagcccaaggcacttttttattattattatgagtgtttcacattccccaaaagaaacatttagcagtaatttttaaatgtctgtgtgtgagcaagctaaataaaatgaaataaaataaaataaatccctaaaaaatctccaaccctaaatgtgcttacttgatggctggcttttacttacaataaaagccaaggtcttacaatggtgtatgaggcccccatgagatctctctgccctcatctgcccctttatcttccctggctcattccactatagccacactggctcgctagctgttcagggacacactgggtgtgttccctgctcagtctgttcccttgctatattcccagcctggatgctctttcctgggtatatgaatggctcaatcgtttctttccttgagctgtttcctccaaagtctccttctcattgaagcgttcccttgccatgctgtataaaacctcaacttcccacttttgacactcttaaagggactttgcagatgtgattaagttaaggaacttgagatggagagattatcctggaccatgtgggtgggcccggtatgaaaacaaaaatccttataaaaaggaaacagcagggatacaaacagggaaaggagatgttacaacagaaatagaagttggagtgatgtaagttgaagatgaaggaagggtccacaagccaagaaatgcaggcagcctctagaaactggaaaggcaaaaggaaatgatttttttctggggccttcagcagtaaccagagcagttgacacctagatgttattagctcggtgagaccctttttggacttctgatctccagactgtaagataataaatctgtgttgttttaagccactgagtttaatttgttacaacagcaataaaaaactaatacaattggcaggacccagactcataagaccccaaagaatttgaccatcttggtccccggttcttctgtgcaatattcaaagtttctattttctgtcaggatttcctttctgacttgaagacagaggaaagaaacctttgcagtacatgcattctggtctccttttgtacctgaggccagctttcgtcactaggtgcaataaacgctgcattagattttgatgggaggtatggtgcccaggtgtgtttcaacacagttcagatgagggacaggggagctggggagaagcaaatgcagccctgccaggaacagtgcgctgctgtttatacaacagggtaaaggaccagacttgtcattattttaacccaagtagacagttctcgcctgtctaaggatgtgattgactggtggtatcttttcatggttatgcagcagattgaacttcagaagtcagagctcacaactgacgggatgtgtttgtaattggacctggtaagaactggacctctaaatagggaagaaagagcagtggagacaatcacattgtggccttttgctagttattcattcatagagttcttcctgttttaattctggaggattaaaacattaaagaataatttattcctatactctcctcagcccccgtgcgttcctttttccttttctgtgtctcttgttttatctttctctctctgtgtcatacttttccctgaccttccatttcctgaaaattgtctgtatttgtgagggtaaccttagtgcttgaaactttttccagctttattttaaaaagatgaccattttatcaggcagtctgaaaatccaaaagtattctctgctccaaatgtcctcttatttaactggccagcgaggaaaacccacaaattgccaaacaagaggaacaacaggaagcggtgatggagctcatttacatctgcatatgttctttatttaaaaccaggggaagtgctgagtggatgggtttgggaaatatggccggcattccggaaagggtggctgtgcacaagtccacacatcctgtactaacaggcggaaagggaacatcatggcatttatgtttccgtgccatcttttaatgtctgttctgtggcatcttcattagatcccaacatgacccacaaactgttaacatatcaaaggcagtagggagagaggtgtgaatatcctaaaagggcttctgatgaactatcgtattttcttatactctaaatacatggaacagagatgttgggataggtacacatttgggttttattaacaaaatagcagtaagatgtataggcagttggagatacccgttgagcctctatgttctaaagacaaatgttccagcctctcatggtcttttggtggcacaaaatgtttcctcctgaagaggtgaaaaggtgaccacagtggtccttctcactttgctctgcctctgtggctgtcatgggagtagagttggctatgacatctgccctgcattgatacacaaggctgattcagggtgggttgtcaggtgtcctttcattcatcatgaccctgagtatgtcccttctgaaaggaggcatacatggtgaaaaaaggggccttccctggagcagatttgtgaagcaaaacatgaaaccttattattggtccatagaatgagcccgagaggcccttgagatggtctttgatcctactcatattttaaggtagaaaaacttcaaagttttaaaaaaactcagaaaggctggaataattgttccagatctcagtacagttgagctacagttcactcagtcatctttcccacttcagaatctgcccattcgtgcaacctttgatccctccatccacccacaaacatttgttgaatgcccataaataagatccagtccatgcctcaaaaagctcatatgcacaggaaggatgggaatgtagggctgtggactaggtgttacgcagagatgtggcagctgaagggtgcacagaacagggagtgtgcacatcagcctgggctctgtggtggagagtggaggaaggcagggagtgatactcaaagttgcggatatgtcttaagagaaaaatagttgtttgccaggtgctccatatgtgggaagactctgtcctatcctatttctatttgcttttaaataataataacaaacaaaatttctattgtttcattgattctctcattcactcaaaatttgagggcctgagatacccagaggagttggaacacacaatctgtactcacgtggggacttgcaaaataatgaataaattaatgttctagaagttactgggaccagttttcatccaatgcaagaataacttctaagttcttctcaaccttgagatttgatgaattagaataacgaacctttgtctcgttatctcatgcaactcacaacaaccctgtaaaatagattttatgatcactgtcagttttataggtaagtaaaaagagacacaggaggggttaagaaatatgcacaagatttcatagccaaagggtgaccacatgagagccaaaactgtctgctatccttaaatcctaggttatttcttttgcattactttgtgttgcttatatatagttgaactcaataaatgacttcatataggtagggcaatttcttcatttaactacacttaataggagaccaaattagaacatttgttttgaattaaaatatgatctttaagacattcctattaagaagggcagtatgttaaacatagagttttagattatcagagctggaccttgtacaaggagataataactctcaatacaattatgtcattttctgccatattacagatgagagagaacacagttttaaaatcatagccaagaacgcaagtttccctactcctcccagtgttatctcaactaacacttactgctttttattatattcagcacctgtaaggatcataacccaaagaaaggaaaatgcagaacaattgggttttgatgagagtctgagcttcagaagggtttggaacatacaatgaaatttctcattccgtggttatttgagtgttgggatgaggacaccagcgcacaactgtggtaatgtctgtggtcaacagagagcaccaggtactagctggatttggtggagcccaagtagaactagacagagggccttgaatggtcatctaactatataaaacactcacctttgattaggtctgctctctagtcataattctgacctctgtggagtttacttaaaagcataattctcattgattatgtaccgagaattatgttctcataattctcattgattctgtaaggaaatgtcctatgcacatggttctagaaatataaattactcctgtcaatatttaaccaaaaaccagacttggtccttcaggtgccagggcagagattgctcatttatattgatgtgattttcactaaataagagctgtaatgtttgaggatcaaactgtccagtttttgaaattagctgctttttgaaatttcctctgaagtttgcctttttcattttcccttttgtttttctgctggtttcttctttctcctccaaagccgcaggactcctgctacattgctcaattctactttccacctccactgctgggcaatttcttccttcctcactcccgggaagaaataattctcctcttgacagctttcctttggtggtttgcatactcccctcatgtagtagtcacattataaacatgcacagatggcttcggaaccctgggcttattttctccctattgtggtacaaggcatttagcacctggtaggagctcaaaaaatattttaggaatgaatgaatgatggaagcaaacaaagaaggaatatttgcctctcattactaccatctggagactccaaggaggccctatggttcagtctactttctttcagtttaccactttgtgtcacttgtccaggtgattttaaataaacattcattcattcattctgtctctctctacaagaggatggacacgtaccacactcaataatggtgagattgtcagtgattttcgtactcttttcctttgagctttttggtagtttgacatttttctgcaatgagaatattttattttgtagttcaaaagtattagcccttttatgcccagtgttccattattggaatgctaagcttgtgggagttatttatatcctactactcaaggtcattgccaaggtctgattttttgtatacaaaaatagcaacctctggcacaaatgagttaacattagatttttaaaattatattttgtattctaaaaatgtttattttataaaatttagacaattagtaatattgggagaaaaaaactacccataattctgatacccacaatccattgctaacccgttcactttacttctagcctttttttagtgcatacattttgatatgtagttgtgatcctgttgaaaattgacatttttattttactttttcaatgaacatgtataaagtggttttatgttatatatctccatgaatttcacttttattgactgcatgctagtctttttaaatattaatatcaagtgcatggtcaactttagcatttcccaatatgtaatagcaacactaaagtgagcatttattaaatgcttgctacttactgggcagtgtccagaataaactggtaggcaaaatgaacttctgctctcccagaggatagaatctacaaaaacaaatttatgctagcgactcaatatggtaacagctttatagtgaacatgcagagttatgggaacatttgaaggaatgtagaatccaattttaagcaaggattagggaagtcttcctggaagaggtaacattgaagcctcgacaaccgtatcacaactgaccagggagaaatgtgagaagagttcaccttgggggaacagcatgtataatgggccagagggcagaggcatggaatgttgaaggcacggaattgtagtttggccagagatcattgtgggaggggatagagagagaaaaaggagagtaaggaggtgatcgaggagctaatagcggaggtgcatggggtaagatcatgaagaactttacatgcaaatttaaagagtagggattatgtcatagaggcttggaaaaatcactttctttcttttttttttttttttttttttttttttgagatagggtctcactctgtgacccaggctggagtgcagtggtgcaaccatggctcgctgcagtatcaacctcttggtctcaagtgatcctcccatctcagcatcctaagtagctgggactataggcacataccaacatgcctggctaggtttcaaattttttgtagagacagagttttgccatgttgcccaggctagtcttgaactcctaggcttaagcaatcctcctgccttggcttcccaaagtgctgggattataggcatgagccaccgtggcccagcccccatcaagaagctttaggctggagaagctgaaagattacattggcttattacaaagatcattctggctgggagtggctcacacctataatcccagcactttgggaggccaaggggggtggatcacttgaagtcaggagtttgagaccagcctggccaacatggtgaaaccctgtctctactaaatgtacaaaaattatccaggcatggtggtgagcgcctgtaatcccagcaggctgaggtaggataattgcttgaaccctggaggcagaggctgcagtgagccgagatcgcaccattgcactccagcctgggcaacagagcgagactccatctccaaaacaaaacaaaacaccagaaagatcattctggctgccatccacagatatatgcagggagaccatagagggggttggagcaagagatgcaattcatgcaagagatgtttgtcatttacctgttgttgtttttatttcaccatcataataaccatgagaggaaatttttatgcatagctatcttgagtactattttattagaaaagaataaaaggaaaatgcgagctgatcttagtgttacaacttgtcagcgtcacttgcaggctgagtttgttctcatgcccacctaccaagtcatttcagtagtacctgttggagatgcgtaaagggcaccttcttgaggatggctctccatagtatacgtggttcagaccagatttcatccagatttatgctgcatcatttgctgggatctcaacttccactctaagcctagtgccagttctgtacaaatgatttttaaaaatccaacataattaggatgattatatacaccttacagccatgtttcatggactccctgggtggaatgcatttgcctaaggtcaacgacattatttccctaaagggacagtcctattgttggacttcagataaattcctcactatttttcaagtgctccagtttatatgattccactttcttggccaaaattctgcttatggcatagtgttgcccattgtgggatctcaaagcacattcattatcatgtgctgacggctgttctgcaggagtggaaaatggaggtagagagaagtgaatgcaacggtgccagcagtgggggatggagccacgcccctgacagggggcacagtctctgaactcagcaccaggctgggaagctttgccggggcctccctgtgctcttttggggcaggccactttggagacataacaaatataaccagggtagagctctgccagaaagcaacagcggggacagtgatggaaaacagatggaggcgctggccttcacttggtgagaaatccactgagggaatggagaatgtttgcaaaatctccgagtgctattgggacacctcttagtgcatttacaaggcgccagcctctgtttgccaatggtttagtttggttttgatgagaccaaattaccctttgaattctctcgaaattttgaacatttcccaaattttgtttgactcaccagctggaggcttggaattaaaaatccagcatgagtgcctgagaaaaataagtgaaatcttgccttattttggaggaatggttaagaaaaggtgcttgtagctgcctagcttgtggttggctccccacattgtgtaattcttagcctggaacaaatcttgagttgtcattttgtattttctcctgcttctacatagggagggagggctctgcctccccaaagtatttcggaaagatggtggactcttctgatgtaagacttcagaaaggaaggcacacaaccttatttgttcttctgattcatggataaagggttaaccatactgtggctttttgtagcacatgcagtttgaacatagctctatattcaacatcttgtggtgagaaggaaggacacaaaaaagagttcatctcctttctctgggggactctgccctttctaggtgagatgatggtgtatgactctaggaatatagataagtgtccttacatacaaagcagtatgattcgctgtctaggggaaagatacaggggaattgaatgaggaatgattctgcattcttagtctctaagatgttgaacctatacaatattcagtaagtagttttgattcttctgtgatgcccctatgcccacaaacatcctcccatcatctcagcctgaaaacaccattcctgcaatcttcctcctttccctctctcttgctctcatgccaccttctttgttttgctgctaaatgctaaaagaataatttagacttgttgcctttcctctctctctttcctgctctcccttccttctccacttcttcactcctagtcccctgacttccttcctcctctctggattacagctgttctcctggtcagcaatccaacctcctcttcacattctttgccttactgactctttggatgagtcctggtgattccagaaccctctgtctctgagcttttatgccactctctcgatgcttctcacatatctctatctgctccctttctcttcttctcacatcccttaattgtgaccttttttcaagattctgtctttgagccctttctttcttttcgacactcctagccaccatgggatctttagcatctctcctacatagatgcctccatttttagctttccagctctgacttttgcatgagccacatcacatctgtattagtctgttctcacactgctaataaagacatacccaagaccaggtaatgcacacagaaaaagaggtttaatggagtcaccgttctacctggctggggagacctcataatcattgaggagggcaaaaggcacatcttacatggcagcaagcaagaaagaatgaaagccaagtgaaaggggtaatcccttacaaaaccatcagatcccctgagacttactcactaccatgagaacagtatgggggaaactgaccccatgactcaattatctcccaccgggtccctcccacaacacatgggaatgatgggagttacagttcaagatgagatttgggtgaggacacagccaaaccatatcaccatctgattctcaaactaaaaaatagtataaaatttatctattttatttattgcatggtgttcctttttagaagaaagctccccaaaggcagggatgtctgtctgtgttgctgttctatcccaggggcctaaactagagcttggcacacagtattggctcaccaaatatgtgttgaactaatgaatgaatgttacctacatttattgagcacttgcctggtaaagaaaatttctaataagatgattatctcacatcatcctgacaaaatcctatgaggttagcccattcataatacaattttgcaaacaaggactgtgaaacaccaagaaggcaactctcctgaggccataaggccatatggctggtgagaggcagaatgtagacttcaaacccaggcagaatgacctaagcccaagctttcaagcactaggttgtacttggaggtgattgatctctgccattgactagctatatgaacttggacatgctttttaagttatctgagcttcagcttcctcatctagtgaaaggacattacctctgacttaacagtgttatatctaagaactttgcaaacagtaaaatacagcattaatgttattcctcaaataaggtatcactaatatttatgagaaaaattacatacaaactctattaggacttacagagccacaaaacaaaccagaaaccaaccaaacagcaacaaaaacaacaaaccacaaattatgaagttatggtgctatacttcaaggaatgcccatcctttctttttccctcccttccttccctctctcaaatatttattgcaaccctacaagtgctgggcctgggctagagataaaaggataaaaataattagttgagattaagaattagtaattagttgagattaagagattgatttatacttctgataagggaaagaataatgttgactggagttcttgtggaacgctgtcatgagagggcctggaaaaggagtttagaagactcaagcaacagagaaaaatggaagaactatattcctctgtgttctcctcttctgtgtgtaagatttgtaaccctgagaaaactggttgagccatggcttagctggctgcccgagtcatgggccccttaaaatcttcacttaggtccccatggatgccagagagggctttaaaggtgactgctagatcaccagcctagataagaaccaggggaatgggaaagtggctaggaaaggagactcatatttgaattggagatgtcaggatagtcaggcagaggcatctgcagttatgcagcagagtaagaagaaaaggagagcgaggcttcataagcacttggttctttggctgagggtctgaagaaatcctccaagacatgtggcatccgccacaactctttgcccacatccaggcccttccctcttgggagcctgtcagaggggaaaagcaagtggctccatgtgtctctgcctttgtggtaacttggcttctttgctggagggatcagttgagcatgtcttcaatacattggtctggggaccttctggttctctaaagctgacagatttctgctcctttttggacttcctaaggttccatttaagttttacagttaagggttgacataaagacatcagtccagagtctgaatcttctcctgccttgtttaagacctgctacaagggctttctgtccagaagagctttagttccatttggggaaaggtagataaagctgggtgctgtcatttttttttgagaagtagcttagtatggacacaagagctgtactctgagaataaggagtcttggattctagctcctgggtttgtttgtgtgacctggaatatgttctgtcccatacgttctaggcttcagtttcttccataaaaagtaggagttggactaaatggtatctaacaccagtttccatattaacattctctcatctttggctggggcgtgtatgtgtgtgtgtgtgtgtgtgcgtgtgtgtatacagatttttctggaaaagaaagattaaggatacgatcccatacacactatcatcaccatatgtgcgtgcattcctgacatggctatgggccccacccatgccatatgctccccacactttgtcagcctggctgtcctttattgcccatcatagctcagcctgccacatgttcctgtgcgcacgagatgcactgacacaggctttgtgaaggctgactccatgtcttgttctcctcgctgcttcttgaggaatcctaaatccagctgcaacctccacacttgcatggctttgtagaaggggaaatgtaagagtaggcttttaatcagctcacacatattttgtgaggcaaggtctgagagggctttgtgaagccgctattcactgcatcatgttgtgggatcaagcctacactttgtatcatatggaaacactgatagtgccagataaatactgagacttaggaagaagcatactgtacttccaaccatccaaatcgtggcagaacctgaggacaaagcattcaactaatatggcagaactctacaaggcaggactgggatggaagtttcggaaaggaaagatttgtgactctctgaaggtggttcacatgacccttgctgtggagggaaatggagtgccacctggaatcatgcttcccctgtcctgctgaggttcgtgtggatatgtgtcaaatatttttcagagattttaaagaaattaaaattaacacttgattcaaccctcagatctatcacttataatgcggcctcggacaggccatctaacttctttaagcttttttgtcctaatctttagaataatatattacctactatgctgccttttttcccaggttagttatgaaattcaaagaagatgatgtttgtaaaagcaatttgtaaacaataaattaaccagtggttatgtgctcaacactgtggagcctttcactccaaataaaaacaaatcaaaacaaaaaccacctccatggatatataggcaattttgacatgtaacttctaagggtctgcttaacaggctcatgtgtcagaatttgacaatccatgaaatagagatcaagtagtcgtaataatatcactgccttcatggcagaggctgcatatctgtttctcctattccacttcatctccccagtgctcacacatacaccctgttggtttgtagttagtgaatgattaaggaaatgtgcgtgtgcctgtgtgtgcttgtatgttgtataggtgtgtctgcactgcccattcttgcatttctatcttttaactgttatggatgtataagcactatctatgatggacgaggcatagtgcatctcctaggccggaaatgtttcactcactaatgagctggacaattctactctgtgaatttaactttcctgactcccttatgcaggttaattttggtaacatatcatattttactctggcttggtgggattaggtgggaaattacagattgcatcaacaatttggtctgcctggatacaatttggtctgtttcagtcacagcctgggtcacacctgttgatatatatttttaaactgattcctctctagatcattctttctgatcagcacaaggcaatatgctgaaatttctcttttatatctgttttattagcatgtctttcaagtgctccttaatcttccaaagaaaatggaaagagttcttatattgtgctacagcctttgtattcacttggcaattgccaacttattttaaaataaacttttaaagtgaactatgacgtatctatacaatatgcacaaatcatagtatacaactttatgaattatcatgagctgtcaccacccagacaaaaaaaaaaatactggcaatggcccctgccccccacaaactctctcatatcgcaccctaggcactacttcttcctccataaaggtagccaacattcagacatcatattctatggattagttttgattacttttaaattttctataaatggaagagtgaagtatgtatatttggggatttttgttgttgttgttcaatgttaaacagtattccaaaatattggagttcaatgtattagtctttttccttatggttagtatttttgaagtcctgtctaagcaacatttgtctactcaaaggtcatgacggtattatcctgtgttatcctttagaagtgttgtattttacattcacatttagaactacagtacacctaacatttttatatggtgtgtagtaagggggtcagtaattattttttcataaggatatctgaaaagacctgacattcctcactgcttttttcataaatcaattgtcttcatatatgtgaagttgtcttggactctctattctgtcccattagtattcttgtctcttctgggtcaatgcccttatctgtcaatgactacagttttataataatgtctaatatctagtcatgtatcaaaaccatattggctatccttggctctttgaatctccatacaagttttagaatcatatgtgtcctaataataacaacaacaatgaaaaaagatgatattttgattgggattattttgaatttataggccaatttgtgaaggattgatatgtttgcaatgtgacatcttctaattcatgaccatgggaatgttcttccacttatttaggtcttctttagttaactcaataataatttttagtttttcttgtgtgtgtgtgtgtgtgtgtgtatgcatgcatgtgtgtggcagtcttgtacatatttcattatatttatatgtatatgatttttcaaaatagtatggtaatatgatttacttattttttgatgctagtatataaagattgaaataattctcatatgtttattttgaagccagaaaccttgctaaattcacttatttattctaagagtttctagagtttttggttttctgtacacaaatctccctgtaataatttttttctttatacctattccttttatttcatttcttatcttatagaattggccatgacctctagtacaatattgaacataaatggtcttgaaagatacccttgtctcattttcaatctcagcttttaattttattatgtctaatgagtgctatagaactgttatcattatcctttatcaattagaaaaggcatcttttcttttgttatgagttttcaacatcaatgggtattgaattttgtcaaatattaaatattttgtgcctctgtagaggtgatcatttgcttttctcctttattatattaatgtgatgaattacattgatcattttttaaaatagactttattttaggaagaagtttcaggttcaaagcaaatttggacagaaaatagagtaacttcccagatactccctgccttgacacttggacagcctttcacacgatcagcatctcacaccaaagtggtacatttgttacaattgattaatctacattaacacattattatcacccaaagtccatggttgacatcagggttcactcttagtggtgtatattctatgggttttcatagatatgaaattacatgtttccactattagagcatcatacagaatagtttcactgccctgaaaatcttttttgcttcacctattctatccctccctcctaactattccctggtaaccactgatctttttattgtctccatagtttttccttttccataatgtaatataaatggaatcatacagcatgtatccttttcaaattagctttttttcagttggtaatatgcatttaagtttcctccatgtcatgttatcacttgatagcatgtttccttttagtgctgaataacattcattgtctggatgtaccacaatatatttatccattcacctacttcaattttgacaattgtttataaatctgccgtaaacatctgtgtgcaggtttttgtgtggatgtaagttttcaattcattgggtgaataccagggagtgtggttgctggatggtatggaaagagtatctcttgtaagaaactgccagattattttccataatggctgtaccattttgcattcccaccagcagttattgagcattccttacttattttccacctgtatatcttctttgataaagtgtctgttcaggtcttttatccatttttaaaattgggttgttcatttggttattattgagttttaagtgttttgtatattttcgataacagtcttttatctattgtttggaaatattttctcccagtcttttaaacattaaagcaacttgcagtcctgaaacttacccaactttattgtgttatgtgaatacacattgccacatatatgaacacaaaattgaactgttaatattttgtttatggattttgaatctgtgtttatgacaaagattgtcctagaatttttctttctggtaatgctcttattaaatgtcagtataaaattttactaccctcataaaagaagttgaggaattttcttgttttttctattctttggaagagttcatttaatattggtgttatttctttcttatgtatttggaaaaattcatggctaaactgtctaggcctggagttttctttgtggtaaggcatttaattacagatttaatttctttaagatatatgactattctattctttattatacctgttttgttgtatttttaaaagatttttaaaaattgatttaaatgtcaaatttatttgcataaaattgttcctagtatccttttatctatttttcaggtactatattgatactccccatttcttttctgatattgtaatttggtaccttttctattttactcttgagcagtctcattcctacccccatcccagaaattataattttataagtcttaaaaaagttttggctttgttggctgttttaatgtacatttattaatttcatttattttctgtttttactgtttccttcattccagtttgttggttttattttctgttccttaatttcttaggatgaataattagatcactgatgttaggctttcttcttttctaatatatgcatttattgatatatatgtctctaagcgtggctttagctgtatcctacatttttttatgacatactttcatagtcattcaattcaagatcttttctaatttctatgctgatttttttgactgttgagatatttagaagtatgtagcttaatttcccagcacttaagtgtttcttagttatcttttgttaataatttacaggtaatttcattccggtcagagaatatacttggcacaatttctgccttttcaaatttcctgatacttgctttatagcctggaatatgtttaatttgggtgaatgttctctgttgtgcaatgtctttagtcctcacgtgcagtattcttcatttgcgtgtgtgtatatacatgtgcgtatgatcaagtttgaagattgttaattatatttttcaaatcttttatttaattcctttttgttatctgcttcttttacttactgagagaagtatgctaaaacctcccactatgattgtgaaattctcctttttgtcccctatagttctgttgatttttgtttcatgtgtttttgaacttatacatttagaatttctacatcttcctgaacaaccacctcttttgtcattatgaaatattttccctttatttttagttatggtccttgtcttaaagtttagtttatttggtatttgtaaacatacactttctcttatggctagtatttgctttgtgtagtttcttttcacttctctactctcaaattctctgaaggcttttatttaaaatatgtttcttgtaagcagtatattactttgaaatccattatgaaaaccttccttttaatggtgatatatagactatttaacaattaatatagtgacatcttaactaacatttaatatagcttccttgtgacacagccgccctttttctaatagtctcaattatgtctcatttgttaaatataccaattaaattattagtttaagctatcgtatgtttcggccttgaatttttatttgactctgttgtatagttgtcatttcttttctaaattccttcatttgctgttttgcatctttagaatatatgtgattgatatgttccagtccgtggctaataactccaatatccatttcttttgtagcttgttatctcttattgattgatggtttggatctttgggcatttggttttgtctcttcgtatgccacatgatatttcatacttgacactgagtacaaaaattataggaaaaaacttgaggctctgaataatgttatattccttcagagaagacatattttgtttctgggaggaaggtctggtgggggaagattgccttagtccagttagggatttattccatgggaaactgggctgcagacttggtgaggacagatctatttccagttgcccttccacctgtgatgtagtttttcagggtcctcgctgaaagtctgggatgtctacctggaccccttctccttggcatatcttcagtctaattttgtccaccaagacttataagactgtgaagtttggttcagctactcagcctcttcattgcaggttgagaattgaaaattgcttcatgagagacagtagcactgaatgtgggactcaggtctccacacgctcactctccccaagatcttatcctctcaggtcgtcactgccttagtaactcactgaggccctgacgtaagattttctacacatatttagctcagcatttttagtttttctcagtgggagcattggtcttcagccagctagtctatctacttcactctcactctcatcaaattattttattcacactttacagatcttgaatttgaggctaaatcatccacattacaaagacagaaacccagccccgccatgctctcctcagtctgtctaatcataagacataaaaagctaagcctctttctactcaggcccctatttcatgtctcattctagggtcagttgtcaaagaaatcttgataagaaagtattaattcttaaggggaagctcttcctcatggataactgcattttattaatagagctgttttgaaggcctacagcctttgatggaaataactattttggaagaatagaagtgaaaggtttgctgttgtttgcttgggtctcagtaatacccctggggcatctacccctacacatacagccaactttgcctttgaatctcccctctccatctgaagtctttgttctttccaatggatttatagcaatttacttcctcatgaaaaaagaacttgcattcctgaatctctgcaatgaactgaagaagctaactgtacaactcaatcctgcccacaagtgggcaaaccaacaaaaccctttgagaaagttatatcctattttatctaataatggtcaagatgcaaaagacgtgaatgtcctcttttatagcaaggacaaaaaactccacgaagatgagtgtatttaaaaaacaaaattgaggccaggcgtagtggcacatgcctgtaatcccagcactttgggaggctgacgcaggcagatcgcttgagtccaggagtttgaagccagactgagtaacatggcaaaaccctgcctctacaaaaaatgtaaaaattagccgagtgtgatggtgcacacctcagtcccagctacttgtgaggctgaggtgggaggatcgcttcagcccaggagatcgaggctgcagtgagccatgattgtgcctctacactccagcctaggcaacagagtgagactctgtctcaaaaatagtaataaaataaaataaaataaagctgcttattagttgtttgacctagacataaattcatttaacttaccatagccttgatttcttctctgacaaaatgggcatagcaatcataccctttcataaggttgttggctgggttgtatgaagtcattcatgtgattattgattaattgagtgatttttcagatttcacaagagtttgaaataaaataattaaaaattaataaattttgttataaagggaatggcactgtttcaaacttagctgctgctattgctgctgtttggtaataaattctagtccccttttgacttcgatcaaaatctgatgccctaactcagctagaatgagttttcccattgcccatgtgtctatttttgttaaacggtggaccctaatcaaccgaggaggtgtttgttatagaaaaccaatgactaggaatcaccttctcagatacagaatatgaggccccaaggggtgaggggaggtgtccatggttactagacctgggggtctcctgacttctaggctgcgagggaaaatatcacagagtatgctctgattcctagagggccagaggggctcctttgtgatcccaagttctggttcaccttctatatggagttgtgttctggtcttaagggacttacccttccattccatcactttctgccatcaaaactttcctttctgttttctaagacaatatcaatggctgtggatattgaacaattgtctgataaaagtgatttttgacattaaggatctaagtgctcatatttgagagtctgatctagtgaccctcatgaataacaatcacaccttacttagtactgggattttccctttacagttgatgtttacttacatgattgacctgcgtaacagtttaaaacaggtaggaccacgaggtcaggagattgagaccatcctgacaaatatggtgaaaccctgtctctactaaaaatacaaaaaaaacaaaaaaattagtcaggcgtggtggcaggcacctgtagtcccagctacttgggaggctgaggcaggagaattgcgtgaacctgggaggctgagcttgcagtgagccaagatcgtgccactgcactccagcctgggccacagagcaagactccatctcaaaaaacaaaaacaaaaacaaaaacaggtaggaccacaacagtaacaataactgccattcatcaagtgtattttgtttgcaaaaatatcttcactttcatttcttatttaattcatatgctaatccttcaaagtgggtgatatcattacccatttaataaaatggcaattgcagctcagaaggcaaagaatgtgctcaggatcataaagccagtaagtgatgtagagagattttcaacccagtttgttgattaggcaaaacagtagtcttttcacggcaccttactgtctttcccaagttatttctccaacctgtacagagagattgtgccttgactaaaaagcgccagcaagtttatgatgggtggttgagtcaggagtagagttttaatcttctaaaccttaacccatctctctttctattgaccatacacttttctccccattagcatctcagcttttagaaatggacattttgtgaacctccccattgcattgcatctcagttgttgtatttgagatgctggaacgtggagatgcaatgcagtgaactcaacaatccaaaatagccaatccaaaattttggtgtctaaagagttaccatttccactataacagatcgccatcaaatttacttaatgtcaatatcacattatgtacactttaatttccaactcagaaaaaaaggtctagatctgtttgtggctttattaccaatgtcaccattatttttgagccattagtataaggagttcagatgtttgagttcctagagtattaaataagagagaatttagacaaccttaattttttttctttttttttcttttttaaccattgtcatgagacagactcaagttcaaatcccaactcagtcatttattgattgtgtggacttggccaagttgcttaacctctgcgtctcaatttcttaacttttaaaatggagataaaatctaccttgaaggattataaggaagaaaggttatttgtaggcagtacttggcatgcaaaagctataacttactaataataattattattttatttatttatttatttttcatatatattttttattatactttaagttctagggtacatgtgcacaatgttcaagtttgttacatatgtatacatgtgtcatgttggtgtgctgcacccattaacttgtcatttacattaggtgtatctcctaatgctatcccttccccctccctccaccccacaacgggcgctggtgtgtgatgttccccttcctgtgtccaagtgttctcattgttcagttcccacctatgagtgagaacatgcagtgtttggttttttgtccttgtgatattttgctgagaatgatggtttccagcttcatccatgtccctacaaaggacatgaactcatcatttttatggctgcatagtattccatggtgtatatgtgccacgttttcttaatccagtctatcattgttggacatttgggttggttccaagtctttgctattgtgagtagtgccgcaaataaacatacgtgtgcatgtgtctttatagcagcatgatttatattcctttgggtatatagccagtaatgggatggctgggtcaaatggtatttctagttctagatccctgcagaatcaccacactgacttccacaatggttgaactagttttcagtcccatcaacagtttaaagtgttcctatttctccacatcctctccagcacctgttgtttcctgactttttaatgatcgctattctaactggtgtgagatgatatctcattgtggttttgatttgcatttctctgatggccagtgatgatgagcattttttcatgtgtctgttggctgcataaatgtcttcttttgagaagtgtctgttcatatccttcacccactttttgatggagttgtttgtttttttcttgtaaatttgttggagttcattgtagattctggatattagccctttgtcagatgagtagattgcaaaaattttctcccattctgtaggttgcctgttcactctgatggtagtttgttttgctgtgcagaagctcttgagtttaattagatcccatttgtcaattttggcttttgttgccattgcttttggtgttttagacatgaagtccttggccatacctatgtcctgaatggtattacctgggttttcttctagggtttttatggttttaggtctaacatttaagtctttaatccatcttgaattaatttttgcataaggtgtaaggaagggatctagtttcagctttctacatatggctagccagttttcccaggaccatttgttaaatagggaatcctttccccatttcttgttttttgtcaggtttgtcaaagatcagagagttgtagatgtgtggtattatttctgagggctgtgttctgttccattggtctgtgtctctgttttggtaccagtaccatgctgttttggttactgtagccttgtagtatagtttgaagtcaggtagcctgatgcctcctgctttgttcttttggcttaggattgacttggcgatgcggactcttttttggttccatatgaactttaaagtagttttttccaattctgtgaagaaagtcattggtagcttgatggggatggcattgaatttataaattaccttgggcagtatggccattttcacaattttattcttcctatccatgagcatggaatattcttccatttgtttgtatcctcttttatttcattgagcagtggtttgtagttctccttgaagaggtccttcacatcccttgtaagttggattcctaggtattttattctctttgaagcaattgtgaatgggagttcactcatgatttggctctctgtttgtctgttattggtgtataagaatgcttgtgatttttgcacattgattttgtatcttgagactttgctgaagttgcttatcagcttaatgagattttgggctgagacgatggggttttctagatatacaatgatgtcatctgcaaacagggacaattagacttcctcttttcctaattgaatgccctttatttccttctcctgcctgattgccctggccagaacctccaacactatgttgaataggagtggtgagagagggcatccctgtcttgtgcccgttttcaaagggaatgcttccagtttttgcccattcagtatgatattggctgtgggtttgtcataaatagctcttattattttgagataagtcccatcaatacctaatttattgagagtttttagtatgaaggactgttgaattttgtcaaaggccttttctgcatctattgagataatcatgtggtgtttgtctttggttctgtttatatgctggattatgtctattgatttgcatatgttgaaccagccttgcatcccagggatgaagcccagttgatcatggtggatacgctttttgatgtgctcctggattcggtttgccagtattttattgaggatttttgcatcaatgttcatcagggatattggtctaaaattctctttttttttgttgtgtctctgccaggctttggacaaccttaatttcttattatgctcactacttcttgtggctgagccaaaacactcatgctacaagactaaatcagtttctggagtttagaagtctttagtgctttcttctactttattgaattagttcttcattgagagagagagagcatatctaggaggagccagcctgtcttggattgtagtgatattttgaatggttcctttacttgtttttgaaagctcataaacccctgttaagtagactaggtgtccagaccttcatccttgatgctggctcaggcccatctgtggagattgacatggctttaacttcatgatgaagttaatttcatcttttaacttcatgatgaagttaatttcatcatttaacttcatgagctatagacccatcatagatccatcgatccagttttccttccaggccccacattaactgtgccaagaccagaaaacacagagacttggcctagacttttttcttggatactcctttcttgtgagattgccactggagctcagcatcttggcctctccctatgagatacagtgggggtgaatgaggagggtaaaccggctgaggatgcaaaaaagagaatgactcactagctgtgcatcttagcaaggcatggaacttctagcacgtggctgctggcaaaagctcaaataactgtatatctgaacaaagaaaccatattcaggactgctaaatcccagcaacttaaggctctgccaggcaaagcaagagaaagaaaggggaaggatttgagaaggggttaattgagggtgaggtaaagaagttttactctgttatcatgttgaccaatttgtatccatttgcctttctcctttgagtcattgtcatttcagttgctgagaagtggactgaaaccttgctgttagatgaggaaataaccctgccaattatacacacacacacacacaaacacacacacacacacattccccacactggcatgccactgcctttttcaagataggaggaatcccttaactagttatttcatcatgcatgaaaaaccccaaagtaaaaatgttggagaattaacaaaaaaaaaaaagttacagccgccaagccaatgttgcattattttctcaaaaactcatgatgtcatggacttagctcacctttagtgcagccatgcgaataatgtgtactgagctttctatcatgtaccattataattagctctgtcaggtcttagccctgcaaccctcatgcagataatatgataatatgtcttcataaccaagtgaccttacatgcacaatatttctccccttatgaagattgcatgtcaataaagtaattgagtctcagaggctgcagcgagggaagatttaggtgattggacgtggagagcagtgatgtatgatgattattattcctcttgtcagggaggcgcgtacaagcgaggatggccagaagatgacagggatgacgggttgcgtttcattaaaaaaaaaattgctgttaatcaccactctattcttttcaaagtcactgaggaaagaaactcttttttcattgtagctacaatgaacatccccaaatgggagcacatcgtaagatttttagcctcagtcccctttcacagtgtctttcttctgttgcaaagaggctaaattaagattttaattaatagatcagccatgggggcctgggcaggggccacccagcttccctgctgtagggctccttgggtttccaaatgcagaaaaggcgcctgccgagatggaattgcacttcctctcctctctgcgttgagagaagtgtgctggtgagctctataaaaagaaagcaaatgtgagagaaccagatccgagacaactatttttacttgaattaatttgtttggacagttttaacacttggaacatttatatttccatactttataaaagcaaacatgctgtttctctagctgtaaatttatcttatgatatcataacagctggaaacttgtagcctggtaggattttgtttcatatttaaacagcttgagaaatatgtcggaaacaaggtatattttcccccatctctgtgtgttttctcctctcgtattaggctaccttaggagtgtcggcagtatcattcagaagatactgaggctccaggatttttattagcctggcattgttaattgctgctcccttgcaaacctcttcctataaatgctgagaacacactggagccccttccagaggagttcaagaatcttttcaaggggaaagaaagctaacagtaaaagcatcttttgttggcagaggggcttctgaagtctttaaatctttgttcataagtaattgactaagatctaacagccttgaaggaaaggagctgatggtatcactttttagtcatagtattaaccttgtgatttatggtacaaaattagccactgcatcctctcattacgggtgctgagtgatttctccaggcaggcaggagggaattgagagctggatttttgtctcctggagctctactgtttcctcctagggaaccacagtgagtgtttttagggataggaatattgttttccttccattttctctgctctgtaaaagaaaatatcaaatgtaagtaaataaataacctaagggagctagaatgttcagaggaaatgttaacccaagggtggtccaagggtggcagtatagaatatagagtttcagatagggtcagtgagtgatttcaacctcctaattgtcccacaaccccctcctctgcctccacaaattcaaggccaaagctttctgagtattttttccattgaatagtatctggagtagagattatatccatttctccatctggatagttttttcctaatgaattaaaaaccacctaatagacttcagggacactaggaagactctgatgatttcaagaattcataatccttattctatgctgacattgaaattttacaagtggagctttatctctacagttcaaggctttggtttctggtgaaaaatatgtctctccctgggaggaagaagcagattaacctattatcagttatttacatctgggtggaaaaaaaagatctaaatattttctgaatgctttaagtagagaacaagcaagataataactaggtgcttggggagtgaatttacgtgtttgaggcgggctgatgcagagaggagcatggatgcgaacgggcccataactaggagctttttgctgttgaaaagcaactttgctgactgcacagtttgtgtgagccctcctacagctcagttctctcctcacatcagcctgcttccctgggtgacgacagtgttaaaagcacagacttcagagttagactgcataagttcaaatcacttctctactacttgcaaattctggggcttgagaaagtcactagtctcctgtatgtagctcagttttctcatttttaaaagtgacaataatggtgccttgctctagggcagttataaatgtaacatcctcataataaccaataataagagtataatcagtgctgcctgttgttattatcccagtggatgataacttagacctatgctggattcgttgtcattggtgatggtggtggtgctgtggatgataaagagatgatagatcctgatatggtttggttgtgtccccacctaattctcaacttgaattcccacatgttgtgggaggaacctggtgggaggtaattgaataatgggggtggtctcccgtgctgttcacatgatagcgaataagtttcacaagattttatggctttaaaaaacgggaatttccctgtacaagctcccttctcttgtctgctgccatgtgagacatgcctttcaccttctgccatgattgtgaggcctccccagccacgtgaaactgtaagtccaataaacctctttattttgtaaattgtccagtctcaggtatgtctttatcagcagtgtgaaaatggactaatacagatcctaaatatagcaagtgtactggtgcttaatttccctttgtaaaacttgagtcctggctgattatctccaaactttcccttgacttctttccctgtattttagttccagtgtgtataaaagtgaaagctgaactttctgaaatgtcgtgggtgtgggcctgggggtgctgctggtgtggtgctcctttactggctctgtcttgccatagatctccacagagccctgagctgtagggctgttgatgacaaaaagagaacataaaatgctagaggaaagatcattctaacacggtgcaaatccccaaaccttccctacaatttctctgtctcccatgcctcacccaaagcaacatttggcctagaagggaactttgagatgatctggccccatgcctttcacactgagctatgcggaattctagcattccaatgagacttgtcagaggtgcagggggaacaagtggtgacccatcagggtggagctaacagggctcccaaagctggcttccaaatccatttttatccattcaatacactggggtctaaaggaaaatatcatttaatgaaaaaattttattgtctaatgtaacaacagaaggttcaagcatcagtgatctagtccatcttgttcattttacagatgaggcgcagaataggcttatcactggctcatgtcactgccagttagtcatggaccctagccttgaaattgctctttggaaaccccactgtttccagtattgtgtctgcatagtggcttccacgggccgagggctcacctcattgccccctccccacatgccctagctggtctcttgaatgactatagcactagcatgtggtggccatgtgtgccaccagtgccaccaccctaatggcagctgtgattatcagcacagaggcccaggaagaaggacagaatggactgctggcggatgaattgggaggggagggaatgggcagaagtggagccacattgaactcagaagtataagtgaagaacccactataatgttgcatggggccttgttcagcaaaggaagattgctgtctcccagtccagtgcagctgaattaagtgatctggccagggtggcagtggggcctgtgttccttctcacaggtatctgtgttaatgggcacccctgcctggagccgccagtgtagctgcttggatttcttattcttttatttccatcctgtctccttgttttctgtcactgtgtcatgtcaaatcattgtcaggtggcagacaccacaccccccaagtacaaaggtatcaggtttcaggacacaggctgaaatgaatataataatgggagccagaacgaggcacagaccacttagcaggcaaggaaacagctaataagtgttgttagtggtttccatggggaggacctggcgtgcatttcttggacaggcaggtggagcacggcctgtcctggggtccagctacagacaggcttgtgcgattagtattgatgcctgtcactttgtggctgccaagctgttgattctgtgaaagaccaaagactctggttatctggtaatcaacactgctctcaggaacgcactggggaaacagaaataggctttcctgagtattgactgaagccatggatcatgttgctggtttgtgttttcctctagccccagccctgagattgctccagcctgttcttcacctgcagtgccaggtaaccattcttatttgtcatgggatcaaattctaaccctcttagagtgagcccatccaaatgctctgactcagctgaacactgatgtaaccagggtgacttgggcgacagcataggaaataagaatgcatttgcatgtcaaggtggaaattcagtctctcacctttgacaaattcccacacctttgacaaattcccaaatccaaatgcatggttgacgcttaggcttcttcttatcccactccacctcacctttgcttttttaaaggctctttaaaaatataaacattaaaatccaaaagggttagtaacagaagaataaaaaatataattcgttttctctcctaattcattttcttggtaactgttgccttctcatatcctcttctttctttcttttttgtattcaagaactttaatatcttatttttccaaaacatcaatgtcctgattatagtgaaccttgaacagacatctcctcctgcccatggaaaatgagttctgacttttcttgggttttgttaagttttaatctctttttttctctctctctttcttatttactctctctctctctctttaattttcttcctttctctcccctcctatctcttcactccctctttctctcccctttttctcccactccccttcccaaagctaaaaaatgctgaaacatgattgcttctttctttcttatgtaaggagcaatgggaactgaggttacacagaatgtgtcacaaactggatatcaccacttagctaacccataaatccacccacttacctacccacccatcagttcatccatccatgagtaccttaggccatccactcatccatctgtccatccatccattcattcatccatccatccaataagtgccactgagcatttaccattggccaggctctggcaagatgctcaggatacaacaataaatgagctttccatcttcaaagagctcaccatctagaaaaataaaaccagtgctggatggtaagtgatctgtgataaatggtatggatatatgtatgtgtgtgtgaatgtgtatacctacctgtacacgcacacactgccacccaaccattaagtgtctgcttggcttttgagttgtattcatttgtagattaatcaaacaactcttcattaatgccagtagccaggcactgtgttaggagttgggtttacagaggtaattaagatacagacccttcttattcttaagtttctcatgaaacacagcctggattatccttccctcccaccctgccacgtttctgccccataaactagaccattctctggtaatctacttagttttttagataaactaagaataatctatatgacatagtccttcccagtacttaaggaagggaaagtatcattgaatatatcacttgcaaaggagcttagagattatcggcccaagcacatctctttgtgaatgagaacactgaggctctggaggagatgaagtgacttctccaggccacacaggaaggcattggcagaactataacttggccttgccaagatgtggcctttcagtccttcccaatgttctcaccccaagtttctctttcatgaggccccagaagctgcttagattcagacaggccactagaggctgatgcagtcatctgaggccatggcatgttacctctcagagcagaagggagaggcttccctctgtggaggggactgagaaggctacccatgactctgaatcaagagtggttttataagtcaagcactttgtcttcctgctcttcagagaagctaaaacaagaaataaccaaaaggagacaatgtctgggtcagcaactgattacatttttgatgtcacactgccttctgggttgggagaagttgaaagacttcatagaatcacccccgctcatcttattcttggtgaatactcttcacacaaatgtcccaagtgccatgctcatagaggggttggtgcttgggtcatcagtaccttaggccatagcagttctcagaagacattatccagaagcaaaaagccattatctagaagcaaagttcaggaatgaagattcggtctctcataggtcctgctaacacttatctttctggcaaaggataatgataaaaagaccgaacagatgacaaaaagaaagcctacattccagatggattgtgagggttagggagaaactgggctgaagcaaaatgctttaatttttgggatattggttatttccccagtttttactttaaatctgttgctccagaaataaaaggacacgctaggctttagttatatgaaaacatgatattggttctgtatgctgagaggagccagaggtgggttgagagcccagctctgtggtgatgggccttggaaccatgtctctgatgttctcatgtgagaagcagatgagtagaggttggtggcagagttagtgaaatagaggctggctcccgcttcccacagtgctcagggacaaatgtggagtatattaataaatgcagagtcattaatgctttctgtgagtgaaaaataagtgtgtgaagaaaagactccattgtcattggactgtaaatggtgaaagggtggaaaatgaaaccaggcttgtgttgccctcctaggatggctgtgatgacccaggccacttggggttccacatgagccctgtggaatgtgggctgggccacctgcaggtcaggctgttcatgctgttgccctcaccttctctacgggtttcaaagtgaacccttgtgcagggaggtgtggcactccctgtgcctttgcttctcaagctgctgagtgacagtgacaagatgctggctttggagcaggcactacaggttcctatgcggagagcatcggtgctcagggaagggaaatccacccctgtgctcttcacacccagacagatgctcacaggttccagggatatacagggacatttctaaatctgtcttggacgtccattcactttatctttagccatggaatgctgacaagtattcagtacggttgagtgaccttctataggtcagagcaggctgtgttctgattgagtttagaaaactcataactctggccaagccttcaattggtcaggtggatggggctttgttaggggagactgcagccagagccagtgtcgcccaccttccttctccctccacctacctgagctgccagtcccttcccactcctcaaacaggacttctctggtttgtgaacacattttctcctcttggtgtgcagagcttttggttccagccctgtcagatagtgatggcacagacccagtggtcttttaatcatagcaatgggctcattgctttgaacttgcatagtctaaaaaaataaataaataaaacaggaccagcaagaacagctggaagaaatagaaggaacttgagtttaaaaagttggacacagcgatggatccaggctcagctggtctcattcctctgcctgaacagcttagcagaccagataacaaagaatccttttgcagctgtttttcttcaagttagagaattttagagccacaaaggaaactggagattatctttatagatgaagaatctgatgtccaaagaaattttccaaggttaaagagatatctgttgccagagccaagataagagcacagcttcttccaacaccttaattttattgttttgttttgattgttttcctttcagttagccccctaggaaatgtttattgaggacctactgtgctcaaagttctgggcaggcttctctgggtaaatcctgaattcaggtgtgtacatctggtgaggaaaacagtaaacaagagtaaaataagacagtcaggcaagagaagacaatgcccagaatccagtgacattcacaccaaggcttaaagtgcaacagaaaatgtgacagcagaggaaccaggaaaacctttccggaaggagccctgggaagagcagaatgggtgcattcaccacctctcctcacctactttgggatgctcatttgattgaatttgtaacaaacaaggcctttgggtcagtcctgcttcttccaccaacctaagggatgatggtcattgctaaagcttcctctgagccagtccttcgccaagtggctttacctgtttattttatttggtcctcataacaaccataaggtaggttgtatcactgattttcagatgaggaaactgaagagcagggaagctagtgacttatcgcaagtcactcacctagtcagcggcaactctctgttattgatggggcttcacttacccttagtgtgaaacagaagtgtccttgagatcacatatgcccaaagacattatcaaaacacagacgtgtggtgatgcaggaagcctgagaacccttggcatctgtgcttttcacatgtagaaggaagaatctcattgcttggacatgaggggatataagcagcgggtcagggcccagcatcacactgaatagagctccaggaggctcacaggaccctcatcagaggctctctgtgtgttttatggttgattgagctttatgaccccaaagaatccgttatttgttttctttatagcaggcctcaaacactgggctttggttattctttaaacttacaatactcattgcatgacagaattatttttcatttctctctttctttcagagccttggaatcccattaggaaatttctagtacaagcatttgtgggagatactagtactcgggttgggcatctgggagagatagacaagctcttattacagcatggaggatggggagattacctggccaagtatcatttcaggttgtggcagaaagagattagctccaatttatcaccgctcacattttcctcttttcccccgttttctgagtgtcatggaaatgatatttgtgaatcccaggggcctctcacagtggtgtcagtttagagatcttcccagatacatctaaatgtggacataaaatgtaatgggaagaaattgaaaaaatatctgtttctcgattctttattactgtggagttaagaaagctatttctcatgccgtttcataaatttgaatccaaatgtatatgttaatgtgtattcagatggcttttggatgattcaaacatgcagactcttttttttaataaagtttgtcaaatttctggcaatttagagatacatgtttagacaatgtatatgtgcatacctgccatatgtacatacactgtgttgtcaaaattgagcctaagtgaactatgatgaaaatttaaaataagtaagcttatgatgaatacttagtagttgaactcagtatttgatttgtaaaatataaacatgagtgaaattaatttttggctgcttagtccattaatattttacctaaattaaatttgaatctaacaaagacaaacatacacatttctctccaggtctattattatctctgtgacacaaaagcacagagggagagttcagactctaaaagaaatgcagtagcaagccccaaagagaatttttttaaatttcagggaaggttttatgagacaggaaagctcaaagacatatctgtgacatttaaatgtctaccatcagcttgtttcctaatattgccattagttttgctaattagggccaattacttaatgcttgcctgggttgtggttgggttgagggtgcatggtggttcatgcacaatctgttcttctgattcaaaaacaccattctctccttgcactgcttgatccttagcagggaaagcgcccagttagaagatgtgcctaaactaacacaaaggaaaggtgttgtctctgaagtttagaaagaattcagtgagctcctaacctcactcaagtgagtttgaaccacaggaccaagctggctgagtgatctcaggattagacaagaagatcaggagtgctccttgatcctcactgctggctgcaggctctcaaagtgccactgcgcctgcacccagtgcttctgagaggtgccagcagggatggatggtaacagtggtagtcccctgtgctaaatgcaggcgtatgggtggggaatatcttttggggtttccctctaaatagtgtcatatctgaaatctcagaaacagaagaacagtcagcatcatgtcttctgaaccaatgctgatcaggaaggttctttacggcagagttttcgaactgtagggtatagaacgaccccttggggaagtctttaaaaatcttacccatcactcaccagaagttctgattcccaaggttgggagtaaagtgtaggagctcacctcactcttggttgcatctcatgagctacattcctcaagcttaagtaactgacactgtacatagatcgttaagttaaagatacaagagcgattaagaatccagcataatctgtaagtcagtgataccaagggtatgggaggcaatgagggcaaagagagtggtgcagtctgggaaggcctctggaaaggtttggaacttgagcaaagctcattggccatgtaagatttagataatatcaggcaatagtgaatgggatgagtcctatcatttgtggacaaattgactaaacaatcacaatgcacataatttcaaatggccaaataaataatcttcatagtcatggttcagggtgggtaaaatattgagggtattacttctcaccccaaaatggcctccatttccctaataccccatctagacctgaaataaggtcagccctcttttagtttcgctgagttcagtagaactgtctgtaactagctttgcaactgatcttgtacaaggcaattaacttcacttagtctgatcttccctcgtttgtataatgggagggttgtggtggatgatttcagatccctttcactctagcattccatttgacccagttaaatgcttctcattattacatgactggaaataggccaggtcaaatgatgccccttcaagcagaaccatcagatccggctgtacacggtaaagatggatattagactgctcaacttatcatcattagtcccgtagtctcataatgggaatgcactatagttcatatctgtcatagttagtatttggaagactcaaagctggtgagattattcacatatttattcctgtgtaccgcatatgccaccccacgtctccccttcatcatgtgtctatgacaatatattgaacagaaaatctccatcagctgactctgacagagtgtattatttacagtggtgtcaaaatgtgctgcttataattgactgggctcataataaaccaacctaagaatcttttcttctcatattccttcttactggtaaatcttccgcttgcattccttccttccatcaacaccttcttcattatttacagaggagggaacacacaccagatggtgcatgagtgatattgtagggtgactctttcatcttgggaaggcctctctctcttctctctctttctctctgacttaagattttgctgtggtaattaagggtgagagaaatcaagtcaattggacttagtttctaaagcaaacagaatacacttctccatttctctgagcttcaggagacaatgtggggtgacactaatagttgcatgggcaatttcattttttatcctcatgttttcacttactatctgtgaaacctcgagaaaattactgaccttctatgtgccacggttatgtcatctgtaaaatggggatactgatagtatctaacccataggaatgttgggactgttaaacaagtaatgcacataaagggctaaacccaaactaagaacaacaacaaatacacctaggccaaggcacacataaagtacggtcattcatgttccccattcatcaatagagagccccctaaaatgttcctgtaccagaatgtgtttggaattgcacagggggagtggcagcctttccagcccccatccagcaggatgtggatgtgcgaggctctgcccccctctcctctccccagctgtgtacctcctcttgttcttctttcaaagactcattacacttggcatacacatgagattcttacctagcctgaggaagatttccaatttttattttgtggctccaataatcataggtattaagtatgactgcctctcctaggctaacctgcaaaagccagaggctgggtttctgtggcaccgtgctcactgaagcagtattttcctagtcatagcagccacctcccatctgccacctcgtctctctgcctggaatatccagaaacactttggtgtattattcccacatttaaatggacaaagtttgctcatagaaagtactaattttgatgagcatttctttttaatttaattgctctgatgaaaaccctcataatcatgtaattcttaaagattagtgtaaggttattgccctgaaaatatgtctagtttggcacacagggtaaatacgtgattattgctaacccttggttttacgcaagaaaattatcattatccatcaaagcaaaaatgtttagtagaatgaagtaactgacggaaaaaatgcctgaacatggggtcctgtgactgagattgatggaacacttatcatgtggctttaatcccagacatttgcatattttctcacaaccttgcttctcctctcagaggtttaggttcttagcttaaaatgagaaggtaaaactaaatcataggccagatgtggtggcttacacctataatcctagcgctttgggaggcttaggcagaagactgcttgagcccaggagttcgagaccagcctgggcacatagtgagaccctgtctctacaaataaaacataaaaaattatctgggcatggtgacatgtgcctgtggtcccagctactcaggaggctggggttagaagattgcttgagtggggaggtgaaggctgcagtgagctgtgaacacaccactgcactgggtggagtcacagagtgagaccctatctcaaaaacccccataaaaaccaatacataaatcatatgtatagtcaagtattttatcttaaaaatcagttgatttctctttttaggcgtgcatagaaatatttgtttgctgagcttctgcgacaagtcttacgtaatgaataaactctggtgttcagttgtcttctaatatagaacattttaatttctgagggaagatgcaatcattcttccatttgtgtgatttctttatttggatggacataagtgaagatttactccacctaggtctcaaaaaattgttcaattttacggtatacaaaaacataatagtggactaatcttatttaactgatgaggaaactgaggcaaaaacacggccaaggatgaattagctatggagtcaggaataggattggggtgccttcattcctagcacagtgtttcttcacctgtacctcctagaatcatgaaagccataaggtacctggtacctgaacttagatcaaacagctttaagacaaacagatgtgtacagtttcaaatgcaaaacccaacatgaacatatttgtttggtttaagggggctttctattttgcattctcttgcaaatgctgttttccaaaatgcttaccgttcaagttgggtaatagccatccttccattgactgatcatccactaccggctcttgactctggcatcacatcttcgagataatccgagctagagtttggctgtcatctagaattcacagttttagtttagcactttgctgactagtactttgcggattagataatggtagttagctttctgagactctgggatggcaagcacatgggccatgatatttgtagtagctagtgttatattgagaaaaactaaggggtctcaccagatgaaaccatctttaatatcactttgctagctatcaatacagcatagtgtagagtttaaagtgctttatccacatttacatttcaaccacagccttgttccctctagacatggtaggtgagatttttcatatgcctatcaccaccagctatatagatttgtaacttaccatgggttgtaaggttatattttggcatttcagaagctgtcctcattggatgccagaatatttgaaatcttttggaataaacaagtaattggttctgtgagagcttatgagttaaaattaacttaatattacccttctgggtttatattggtttcttctcctgatttttattttattaagcacctttctaagtcctggtaaggttgggtgtatggacaaggaaaccttctacttggatgaaagaaagccccatggaaggctgagtggatgagcgccgactcaccttggtatttaacatgactacagaatggataggtcttcacttctcaggcctctgcttcccattccacaaaaccaaagctttgttcagctattccctgggtggggtgtttgcctttcctctgagaaaatatgctggcattatagaaaagggagttgaggggtgcggttttcctctggcatagatcactttcatctaatctgaacctcatagaaagcctctgctgattcagaggacaatgactttgacctatttatttcaaggacccacccaggctcagcccagcaaaggagtacacagtgcttgctcagaacacagctgaaagaggaggtggtgttcaatgggaatcacaaaggctatggtagaagtgagtaatgagagctgggctcgagccctggtctgagttcagtgtggatgtttaaaggcgaccattcttaagaggcaagagaattcgatactgggttcaaatctcaattttattttaaaagtgcatcagtaacttgtagctcatttgatggcctgcagcccagcttgtttagaaatcccttctattctctctggtactccaagtcccaaagaatctgttctgatggtgtggttacacaaccagccaagcacagccttaggttgctctcaactcagaactcaccctatcacacgttgacgaatgcaagagcctgttagagacactggaacccaagatggtgagtaatactaaacaaaggccaaactctctaaaatgcttaggccaggaagaaggacaatggggaaaaaaagtttggatcagtatgtatatgtgtgtgtgtatctgtatgtgtactatatgtgtgtgcatagtgtatacatatgtgcatatatttgtaatatgtaaaaattatatctataattgtattcatgtacatatatacatatatgttcatgtgtacatatatatgtatatttatatccatatatatttatattcatatgtgtatataggtattcccatcgtatgtgcatgtatagtgtgcctatgaaggacaaagcgcggtgcaaagcactgtggggaatacttggtagattaagacacaggtcttcctctcaaggatctagagggcatgtagttattaaaagctgttaactatcccaggaatgcctacccttctccatgatttggtagctgatataggataatttgcccctggattttgtgaataataaagaacagaaggctggtatcacaacacttgctgtggtcagtttctctcctctctcctgaaaggcagtaatcacattttctagttgtactgcctgcttttagaaaaggtctctgctgctatccaaccagcacagtccctctttgcttcagggtcttggcaagagcaggttctgattctgaagcattaacattcttcagggctctgactcccctcagaggtctgtttgcttctgaccctgcagatgcagggcatcacggatgtttatttgtctgttacctaaactcaggacacatgcacagcagtaaattcttcatttgccagagttaatcacagccatgctatagcttatatcattcccactgcccattgggaaagccttgaaaatatagatgggatttgttctccagcaaataagttcaacaaaccagattggtgagactacacagagggagaggtttgagttggagtccctccttgggtaatatcttattccattcctgccaaggatcaaatttaagacttgctgcattccaaaaaaatagactagtgacaacttggagtggagggaaacaagaaaaggttctgtttgtttgctttttcattaaacatttttaaaaattaagaagtaatggagaaaaatataatgttactcatgttttcccaattcaactgaatatgaaaaagtgctaacattttgtcatatggacttcagatcatttttattattaagaaataaaatatttagaaataactgaagtccctcacattcctctccctagtcccagcttccccaaagcaaatattgtcatgcatttggtgtgtagctagtccttttatccttttattgcgtagatctgtatacagctataaatagtatacggcattgttttagtacttttaaaaattattatcacagtgttatactataccttttaacaatgtgtttttattttatcaacattgcgtttttcagaattatctgtgttgaggtatatacattgtgttcactcattttaactgctatacagtactccatcatataaatttgatgcagcttatttattcattcctacacagatgatcatttccaaatttttgctattgtgagcaaagctgcaatgcacacccatatatagtcaaccctccatatccatggtttttcatctgtggatttaactgtggattgaaaatatttgaaaaataattgtgtctgtactgaacatgaaacagacttattttcttgtcattattccctaataatgagttctacagatatcttctatgtcaagattgctaatcatgctgctttttcttctaaatttaattttttcttaatattttgtaaccatgtttatgtgtttctcataaaggtgttttattaatgaagttaagctagtaactagtacttccaaaatctagtaggttaacacaacaaaaatcttgtacaaagtgagctatgtaattgtgtgattcctgcagtccacttggtgactcacagatccaggttttcatctcaagaaaaagcaggttggagctgccacgttgcgtggaaaacttacacccacttacttatgctttggctgggaagtggcacatgttaattccactcagagccctttgggcagacctgccttgtatttctaggtgcagagtggtctttatttattatgctcagctgagttggtgtgtgcctttagtgtgagaatttagagttttccttagttatggaaaagttctctattgttagctgtttaaattgcttctcagtagtcctgctgtggcctaaattctggaaattgtgttcggtatatgttggagactccatactacttgatttctttcttttttttttttaacctcattatgtctcagtgctgcactcagaattatttcctcactactgccttccagttcactagtgttctctttaaccatggaaactcttgcgttaatttcatttatagagtttggagatttcaattatattatttctgtcttctagtttctatattgattattttgttagtcatttttctcattttatatctattagtttacatagtgctttcttattcaaaaggatattatcttttactttaagtattttttaaggtttttcagagacaattatgtgcacttttttctgtagtcaaattttcctctgattgttgagttctgtggatatcttcttggttctgtttttccttattggttttgaattttaggttgcttgctcatctagagtgaaaattatctttaaaaataaacctttaaatatccatcatgttttgcagattttcagtagtttccatgtggctccctgagaatctcaggccagaaacaacttctatgttagtggactaggattcctgtctcatagtggtattggggatattgcagatccagtacttagcagcttgtcacatatctggtctgtgtgacttgctctgttcattcctgtctcacatgtacatggtgatatagttcacagccttaatttttctcattttacccattcaggttggagaccctacgagttttatgctgtgagtcaggcttgtgtccctaaatcagtgttcagtgacagccttctctttgcctttgtctgtttctaacctagagttcaacaaccccatggttccagcattttttccttgatgtctgtttcagtacttttccagtgtataagagatattcatcttgtattgggtatagatacaacttctaatttttgaaatttcagctagaattgctttttgtggtgtagcaaggaaaatgtattgaatgtttaagtttacaatgttatcttgactagaaatcttttacatttattttaaagagtttattttgatagtaaaagaatagatgttcattaacatcttgaaaagcatatagaaaatatttaaataaccaaaaatataactgcataaaataattacagttaacatgtcagtgtgttgtcatctatattttgcttttcactgaatagaattcacactatatatttcgttttatatccttctcttttataccagccattatagggtggatttaccatgccataaaataatcttcaaaagcaatttttttaacagccccttaatgtcccaacatatggaggtactataaaaacataaatcatccaaattttaatatctctcttagcataaattaacaagtaattacttagtaaaagagtatgaatatttgtaaggcacttgatacataatgaaacattttgatccaaatacgctatttccaatttacattccaatggtagcgtaatcattctctagccagtactaggtattttctctccaattttaccagtaggatagatgaaaagtgccgtctgttgacatgttagtgctctgaaatattccgatatctcttttgatattatttcttaaattctaattctttagctgtatttttttctaaatgagactctagattcctctccttttctggttttcccagagaacctgttttaatattttccatttttcatgatttttgcttacatgcattttttcttctttagccttttgttgtgcaagcattcttattttatgactctttaggctgattgtttaattaattaattttagtaatctcctgtcaattcacaggcttacatgctttgttaacttctgagtctatattctgtaagtcttgatatgaatttgcttattttcatttatttccaaagtaggtatagcagatgtttatttactttgtgatctaatgtttattgaggaaatccccagatttatttcatcttttaacttagatttctgacattataattttattaaattgaagtttgagaatacagtttttttctttcaagaactttatcaaatatactaaatgaattgacaaattttaaaatgcctcaggggtatttgaaaagaacttacattttctttttgaagggtataaggaaatatatgtatatatatgagtttatgtatttatttataattatgttattcaaagatttcattccttttaatatttgtttaatctggctgacaattgtataatatttttcagctcttcacttctggtagtttttgctaaatagattttggtgtttgatgaatatattatatgtgtcataagttatatgtcctttatatcttcattgcagaggattccttttctcagcacaaaatattatcttcttttcccagatattgctttctgacttatatattgttgctatcattgttttttgcaagactttctcgtatactattgtttcaataaaaccatcttttacattttatttaaatatttttggtgagctgtatgtacttgattttgtaacacctattaggaaaacttaaggcattcatatctgttgctatagcatatatttgggcttaattttataactttgtttaatgctttcttgctttttcctttttattctgggttttgtctgttttcatcttatgtagaggtttggaagatcaaaatattttcattaattgtactagtgataatccttttgtttataaactatatactaaatcctatattcctctgtcaaattcaagtaccagtttctaatgagaaatgtaaattatctggacttttcctgactttctacttctctgtatttatcagtgtttattccttttacctggtgttatgctatcaacattttatgataaaatcctgatttttaaaaatatatgacttttccagactttgaatttaattttgtgcccatgttacaacagttcttcatatgttttcctaaaaagttaattgatttcaaagttccttgccattttctttatagtttagctattgcagtcttgatttcacagtcttgagttcttgatttctctttttctttattagttgacagacattcatttttcgtgtgctttctcaggaagagaataaaaatgattaatgtttttatgattttaagcttagtaaaatgtcttcctgcaacctttttacatgaacaacttggacataaacctcttaagttatagacttttctagtcattgctctggacaaatcgtttcattgtcttctgacatttatttgattttgcaaagaagggtgaggccagccttatttttgctactttagagataagctctcattcctcttttcatttttgtaggattttaaatttatcattgagatttaaaacacaatagaacttccctaatatttctagtcactaaaaaagttcatttcatttggttctcactaagccattttatttaaagccttataagcatataaaacttataaagtctttctctggggcaatttctattttattaattcttttgtgataaattttctgttccttcctcagtaacacttcatctggatctaaattgtcctccacgtctgtcatcttctcttctatatttttcctcggaatattgagaaatattctttaaattttcttccacattattattttacattgtttcagttttacttctgtttatattgcctcaaatatggactttcattttaccattggattttgggtttcctaggttaatttcttaattcggccagtttactaattatctcttcattcatctcagaataatttttcctttgacactctgattctcttttacagagtctgttttacagagtttttgaggatagcaaacagatgagttctaaatcttgcttttgtctcatgtaaaaataaaatttcaaatatatcctcctcatctgagtcaacatggaagagctcctattctagatgatattgttgtctttttttgtagaatccatagtggcagatgtatacatatgtttttctatgctcatttttgaatagggattgttgtgctctaagaccaacaagcaggttctgtggcatgttccttgcttctatgtcactctaatttggtaggattctactcttgaagtttgaagtgatgtacttaatttgggatgtctaggaagcattcttctgtgtgtttctgatttgcatttttttttttttgagacagagtctcgctctatcgcccaggctggagtgcagtggtgtgatctcggctcactgcaagctctgcctcccaggttcatgccattctcctgcctaagcctcccaagtagctgggactacaggtgcctgccaccatgcctggctaatttttttgttatattttcagtacagacggggtttcaccgtgtttgccaggatgggcttgatctcctgacctcgtgatccgcccgcctcggcctcccaaagtgctgggattacaggcgtgagccactgcacccggcctctgatttgcatttttatagacttttattgacagctggatattttgagcaagctagggagccagatatacttttccattttcctttgaacggtgctgcatgtgaagactatgttcttcaggaagtgcttctccaatgcttttttttttttttttttgtggaggagggtggtggacagagtttcaatcttgttgccctggctggagtgcaatggtgtgctcttgtctcaacacaacctccacctcttgggtacaagtgattctcctgcctcagcctcccgagtagctgggattacaggcatgtgccaccacacccagcaaattttgtatttttagttgagatggggtttctccatgttggtcaggctggtctcgatctcccgacctcaggtgatctgcccacctcggcctcccaaaatgctgggattacaggcgtgagccaccatgcctggcccgatgctttgtctttacccatttataattattttcttcaaaggaatgacctatccctaaaatcttcctgtattttcttcattgcttgattgaggaagtatgaagagaattctagccctctatggctctgaggtcacttatcagatggctcatcagtgtggacaggaagtgggtggcatcttgacatgctttaagtcaactagattgtgtatgcctatgtcctatgctcttattttgcttcttcaaatacacctaagtgtgagggagcattcaatttggatgtagacaataatatatggtaagaagctctgggatctgggtcagggcctcaaggtccatctgattgcagcagggatgtgggaaggccatgtggggtccagaacacttaactctcttttaaatgaaacacctaatcactcacctgtttctgctgccctcagaattttagaaaatcactgaaatggaatgaaattaaaacttacctactccaactcctttaacaggcagatggtgtgaaatttaagatgggaactgaatgaaaaaaaaaaagatatccatcaggtaaagatgagaacagaggatgcagatggctagaaagctggtacaaagatgtgaagtagagggtctaaaagaaagccaggaatagttgacgtatagtgggctagcaagaaaatggaaagcagtgtccaggaagaagatatttttatgttggggtaaggagtttggatttaattaaagtgttattggaaggccctgggggaggatggtttaaaaagttaagtaacctaatatgatcagttaacagcaaaatgtttatgtatttgttttattcactcatacacttgtatattctttcattcaataagtaaactcatatttatcaaataaccactacatgtgatggagttatatcctaggattccaaattcctagtataaggggtatttctattatgccatgcaacttctctactggacagtaaactttgtgtgaacagggtctggacttctatatatttgaatctcctaagacttcaacagtcataggagtacctgacttatggtagcccctaaataaatatacttgatagatgaatgataagtaatattctataatgttcacagaggtctctgaaatagaagaatatttctaaagcacagttaaagatagtcatcattagcagtgaccaggattccctgcagggcacagttccataaagctcttgtaaggactgatcagtgggttggatccattgactcttttaatcaggctaaatatgctgtcccttctatgcatatatttgctgggattctgccatgccagtactagtttggccatgttgatatgaaagagtaaggatttgtctatttagttgccaactaaggtgtaatgaaatctcatggcaaagtgtatatgaattcaaataggagccaagcccttcacctctactgtgggttatatgacatacagagtcttcttgaaacatgtattcccaagactttcaacagtgcaacatctgttttactttgagggggctatgataagcatctgcttagaggaatgatctgaacaaaaccagggcacatttgtttgccatgctatagattatctagtcttacattgttaatgaataaatcatgcaggatggataaaccggtaaccacaacagcatgtttcatactgcatttaagacattaatttatgcattcatatatttttcctgtagacactaaaaaatttatgttttaaatagaagatcacatggattttgatgtagctcagcagttggatgtagattccagaaattcctttattaaattagagcccagttggctgattagggttctaatgttcataattgtaccatttgatgcattaagataagtgagccaaagataaaaatatagtgttttatgagaacataaaatgcatatctatgtacatattccatgtttgtatgagacattacatttaatcctcaaaactcatttcaaagttcatgtcgtgaacgtttacaaaagttcaggaacctcttaaagtcacataggcaattagtagcagagtctgaactgagaatcacatcttctcaggcataatctagttttcctggcttaccacgacaaccgtttcattgataagttattttgaaatcacatttgggggccatcactcacatgtagtatgaagctaaatctagaacaacattcattttgaattctttggtctggtacacataaatagttcttaggatgaatcacatagatggaggagaaagatagacaaaacgttgatctttgggtgattgcattgaggattctaatctctactgacgtgctaaatgttggaattgaactaaaaagagtcactaatcatattacttccatagtgaaagtagcagtgtctgcattgtatgctcttttgttgtttaatgcagactccctaaaaaggcagattttggtcactccgaggctgcattattctttgtaccaacttggctatcctaaaacgagcaaaacaagcaagcagagaatcgagacatagtaaataaacattcttaaaacccacatgttcctttaaacataaagaaaaaaaatgacccagtgagaattggaggtgatttgggtctgcattcgctcagctagaccaagctgttctcaccgccaccccccaccccgcccgactttgacttcctttttatttgtatcttccatttcctttccctgggccagatgtgtggattcccctgttgtgcccaatgacagagtagacttttctggaaactgccaggactatttgtaatctcctgactttacagaggtctcatatgctgagaaggacaaattctgatgtttcacagcaacaggaagagggttagggatgttgagagaaggacaatttgggtggagttttcacatatgtttctctttgatggagaatccagggcagggatctggtttgactggggccaagttgtatttctgctctctttattccatgtgacttgagagagcaaccacatgagtacagagttttagtttggagcatgacttcctcatcctagaatgccagagtcggagaggccattaaaggtcatgttgtccaacttcccataaaattaattttagatgaagtctgcaggagagagtaagagagcctctgtttatagaagaaattgtctcctagaatctaaaactgtctgttgcccattggatcaacatctatggccacccagaattggtgaatattatagaaagaaagtgtgggatggtgttaaaggacattagttcaactcgtcacccaacgcccaaatcccttgattagaaatggaaaatataagatatattgatggtattgaattggtatgaaattctgaaggttttaaaatgctgtttatccccaagaccaaaataagtgaatcctaggctcggctggtcacctcttcctgcaaggtcctgaggtaagagtatgcatcgatgctaatccctgatgggatgagactttgatattagccagggcctttaggaatacaccccagtaaaaacactgatgggctaggatgaatgtcacaggaggctccttaccttagtcagcttagggtaacttaagggtctatgctagaacaaaagcaggccaaaaggtctgttctccttgtggtcacctctaaactcaaattcaagttgcaaatcttatcacttctctgggagacaaggccttacacaccggttagcagcagatgaaagcataaaaattagagtttgtggcccattgtctggcatagatgtgtaggggaagtggcaggggatcagagggtatatgacaagggcaagtgttatcttctgggaccatcctacttagttatgtgggagaggagaaagcccctgaataatggaagggaatgtcccaagggatatatcctgttgttactctggctgtgtggcagagtcgggtagtaaggaatctagaagggccacatcaacttgtataggcccagtgattccaactgtatgcaccacagtgaagaaaaggtattctatgctggccaaccctgctagtatttctcctcttcctccttaggggctgggttgttgggcttgggaaagggtatgaatatccctcagagaacatccccttgcatagcatctctacccgaaaatagtcgttcggtctccattttgttcctggtgtcatctaaaataaggaacaacaaatagccagattcaatttcagcattatggtttgagcaagggcctggcttctagagtggggtgtgttgagatggttttcccactatttttatttaactcaccaaatatattctgtaattgggcatgacccagcaaaatgttccactctgaagttttatcatggaggccaaagagcatgttcaatgtctgccaagttctcaaaggaaatagtagtgggagggcaggccctgagctggagcttccctggtgactacaaaagcaattgcagaggaccacgtgatgtggctccagagcacatgactcagatgtccattgaaaagctgtatttgctcagggtgatggctaagaaaaatgtcttatgccctttaagaaaagagtcttgttttgaagtgagataatccttccattttcataaggtagttactgaaaataagtgttcattttctttgtgcagaccaaggagtaggccttctgagaaagttgcactcttattaaaaaaaaaaaaaaaaaggcactatttcagatgaaagcctgagatgcagatttgagatcttaaaacttgaagtaaaagtcagcactctgatgtgcccagcctgtcctttctaccttcccgttgttaagaggtgttcttttctagctcttgaaggaagactttcattcttaccatgtcacctccttcttcccttcttttttattttttggggtctgaaatagtaatcctgcaacacagaacttgtttggaattctgactgttttaatccttgccttaatttactgaggttaagttgaagataggaagttgagtgttggttttttcaaattgtggtcttagccgtaactccgactttgaacattttcggcagttccatggatgtctgcggatggtcagagtcacatttcattgtctccaagaactgtcatgaccctgtctttagcattccttcaggcttctctttactacagatcaagaaagtacttggcaacagtctcccattaggagagagcattcagggttttagtttcaacttttcgaagtttaatgcttttccattttcttttctccgcgtcagccatgggacaagtaacgtatagttgatcttcagtattccctgattctgtgtttgcaaatttgcctgcccactaaaatctgtagcccccaaatcaatattcatgacacactttctcagtcattcatagtcatgcacaaagcagtgaaatgttgagttgcccgatgtgcatgtttccagctgaggttgaacaaggtgacactgctttttcgttgcagctctcagactgtatgcaaatgtctttccaatggtctatttagtgctatgcttttcatgtgtttgtgttttttttggtgattttgcagtttaaagtggctgccaagtattgtgctgaagttctgtatggtattcctaagcccaagaaggccatgatgtgccctgtagagaaaatccatgtgttagataagctttcttcaggcataagttatagtgctatgggccataagttcgacattaatgaatcaacaaaatatcttaaataagtttccttaaacagaaatatagaaacaacaaggttacgtctcaatcagttgacagaaatgttgtgaccagaggctttcaggaacctaactctgtatcttccttaggagcaatcgttcagtatttgctaattcagtgtttgcagagactttatagggtgtagctgctgcaaatgacaagaatcaactgtaatcatttactaagtatcagctgtaatggtgaagataaatattctagacttaatatgccaggagggatgtgcgtgcctcatatgctctatggacatgttacagtaagggaaataggaggtgtccccctcaacctggaactcctctaacaagccagatagaaatgcatcattttttaggccatttcacttggatcgaagcttgttttctttcacactcctagtgctttcaaaaaaaaaaaaaacttggctgtttaattaaaaaaaatttggcctgttttgtatatatttgcagtctgagcacccatagaggggagtcacccctctcctccagacaagggtgggttgttgaattttatgtgaaatcttgacattgcaataaatctctgaacctgaaccagcctgcactggatatttaatactgttttcatttccaatactaatcaatcctggaagaatgtgctgttattttttagttacatgtaaacatttagatgaatataaaatggcttattgatagcttacatgcaggcaagtttattgatacttttgtcaaattctgtttgattgattgatttggccatcgtactgctatggatatggaatagaaccaatatgacatttttatttcctggcagtggtacctgagggtgaatgggatatggggaagcttgagctctgtctcttggatgagagcactatcagagcctgatcagtggagctcctttctttaaggaatgacctcaactctgtttcacatcagacacagtttggaagaccccacaggccattgcactgttgtatcattcatgtgggaagcccagcttcacaggggccacagaaatctcctctatgtgacacttctggctacagtgcattattttgttttattctgattttttaaggaggtccctagtaggcatcttaggaaactttgaaaatatattaagaagattcggcatttgatgcacagatacaaataaggccattttcctcagcctgcaagcccagtctgagactttgcaacctttctctcttctgattgtgaattccaagtgtcaagacaaaatagcactaagaaatcagtaaaatgtgacggtttttctcaagcgtctactaagagcctagccagatgcacatttcttattccttttggtaaatagattcagatttggtatgattcaatgaactaaaaaatatcccctgctcaaagcttgtctatgcctgctaattgcatgaagcttaacagatcctccacacacggcaccaaataagggctggctggaaatcaaaacctccttgccaagcactttggattttccaaaggaactgtaatgttcctggagatgtttattaatggaaatggggaactttgtggaccagggtgaagtcccagagattgatagcctgttactagtgtttattatttttgactgcaggttttgaaagcttttcctcctatcctccctaaaaggaactttctccgtcacttgggactgaaaatgggggtggagttcaacacctcatggagcaatccaaaatagacgcacagaatgttaataagcccaggattttgccctctgttttgtattgctctgccccaaaatacaaaacctaattagtgcatccagagaagcgttaaatggatttcatgctgtttaataaatgctttacgtgctttggtgccactgcgaaatgtgtggttgagtgagggtgggaatagggagaggaaatggttgctgtaaatgcttcctaccaatgtcaagcactataggatgagcatcagagatgcgtgtttataactcaggtgcttcatgttttcacccgaattttcctccttttggctagcctgttattttccttttgggcttttgtttttttaattttattattattatactttaagttttggggtacaacgtgcaggtttgttaatatgtatacatgtgctcccagacatcgtctccaaaggctcaacccacaattgtctacactcagaacaatgagaaattgtgagtgacagatgtgcactgagtgctcactgggtgatgagccctgaatgggacatgggaattagaaggtgtggccattgcctctggagagcttatgtccctatggggaagatagaacacataatatcctattttcaagatagaccgtcagtctggtgttcaaagcctttcataatgtgtcccctatttagtgactggcctgtgacatctctcctagaggctggtctttattgtcttatatgttggtcagtggttgtgagacttcgctgcacagtagaactgtcaggagagctttgaaaaagccccagtgttcacactgcaccctctatcagtgctttgagatctttaacctgcatcaggatcacccagaggatatgtggaaacacacatttctgggcttcacacccagcatttctaagtcagcaggtagagggctctaaaaatttgtatttctagaagttattgctaatgctgctagtccaaaatcacacttgaggaggattggccttcatcaattaaatcagaattgctgtgtgtctgatgattccagcatgcagccaagatggagatctgtgttccacacattctttaatgcatgtggtggagacagatgatcacatatcgtgaatgcctctgattattttccatgatttagctatttttctctgactagacagtaaaagtcgtaatagcaagaactgtgtatctttaccttttcttgattctctcagggtgcccagcccagggtggtcacacagaagtgtaacttgaatagtgttaaccaaggaaacgtagaagggtggatgggaagcattgcagataccaccagcactcttcatttccctactctccaaaacctctaaggaaagttctttccctctatttgtggactctaagatgcattgcagagctactttctctctcctcttccctccataggggagggtgcattttcagcatttacttttaaagaaagcaactgcaaagagtactgtattcatagataaaaactgcattcacatcctggctctgatgtttcttcttatatgatcttggtgacactacttaacattttcaagtccccatttattcataaataaaatacgtataagaacatctctttcacagacttctggaaattaaacgagtttgtgcttaaaacacttctaaggacaatataaaacacaaaaggcacagtaggccttttgtttataaccacattgtagcaaacacacatttttcctggaaacataatgggagtgctcttgggttatgggaagtagcaaggggagatgagcaaatatttgtgcctcatcctgacctcgccatgcatggtgtgaaatgtctaggtatgccatcaagaaccaaagtcctgtgtaacagaaaatctccagtgagcctgtcatgatgatggagacaagcctctgttgaacttcactgccagtgaactctactaaaatgtcagtcctgtattcgcatagcctatcagtcagggagcaggctatgagcactgagatttccacagcaacctgttggtgcctttagtgcattgcttccagaatgattcccatgaaataaagagatctagcattgtacttactggttcttagcaaatgttcttccccgtaggtagagtgccttaactctagaaccataaatttgttttcagaatgcaacaagattgcatagttgtgtaataaagctcctgacagagtgttaaagataggagggggagatggtgaactgggagagccaggaatcctcatcaaactattatgggaggctctgccctctgagaagagaagtgctgtcttaagaaatttccttgatactcaaagggtgttttacacagaatcacctgggcttttgttaagaatgtggactcaggccgggtacaggggcacacacctataattccagaactttgggaggccgaggcgggcaggtcctttgagtccaggagtccaaggctagcctgggcaacatagagaaaccccatctctacgaaaaatacaaaaatcagccaggtgtgatggcatgcacctgtagtcccagctacttggtgtggcttgaactcccttgaaccagggaggtcaaggctgcagtgaactgcaattgtgccagagtgaggaccacagagggaactctgtctcaaaaaaaaaaaaaaaaaccacacacacacacacaaaaacaacaacaaccaaaaaaaccagaatgtgaacaacaaccaccaaaaaaaccagaatgtgaactcaaacactcagacaataccctagaccttctgaatcagaatctgcattttttttttcaggagtcccaggcaatttgtatacacttaaatgtttgaggagaaagatagaagagtctcttagaactagactgggaattaagacacctgacttggtattcttttagttccatcttcacctcagtttctccatatgaaaaaaacagataagtagaataagttccttcccatcagttgacaggaattggtagtaaaagaatccccatagaaaagatttagaagtctaaggtccagaagaaccatcctcttcctcttcacccagctcctttttgttaacattcttcgatgcccaatctcacttccagctgctttggggtttggccgctatagctagatgtctcagcagcttccaattcccattatgagaagttgaaattctcccataggtacacagttcttctggcatcccgcaccatctttgcctgtgctgagtggtgtgtggtctggccttcaagggagccgtttccagcagtacatgtgaggagaggacctgtctcttggctgctaggaagcactccagccagacaacagccctctccagctactcagtgcctcccacattggacaactgggaaagcacacagggaacagtgggggttgttgagctcagcgagtgtttcctatagtgcataattaaagaaaacacctgtgtagctgctaaatcacttcccgctgttcccctgtgcaaatgctgtgctcaataaccttacaagtgcctcattccttctacccaaccgaggcagtgcacagagccacaatgcataaagctggcaagttattagttcagggccccttaaaagatctcttaggattgatttgttactagtccatggggtcccttggttagtctggtggcattttgctagactgcagcttcagggaggctcagggatgggtagtgggcctactttctccaaactgcccttctttgatcagcacttctctgtatccaaggcagtcccgtggaagagctctagagctgcaggagccagaaaaccttaaaccacaacttcaatactgtaattgtgggccagatgcttccccaggggaaaacagccaacaacagtgaaatgagatgcaagtgggacctatggattttgtttgaaattcaggaaagggaagtgacaataaatcaaaaggaaaagctatcattctaaacagacctcttcctgctgctgaagtttatggggtgctttggttaccactaggatcttgtggggcactggctgcccaaagtgaagaagatagactcccttgtagcagcaggtggattggcaacaggattcagtgtgatgacaggctagctttgtaatttacttcttccagggcaaagcaacatggctttcactgcaagttttagagtgtttgagcagatgagtgaatgtgcctaagagacccagtgaagaggattgctggatgttgggcggtggcaggggaggggggaagggctttaaagaaacagaactgaggagaaaggacagctgcagattcactcagtctcttctgcttcactgctttgttctcttcatagccttggtcataactgaaattatcttgtctatgagtttgtccgcttgtgtattatgtatctccccaaataggatgtgaacgctgcaagagctagactcttatctaacttgtgcagagctggatcttcaaaactagtcagtccagtgcctggcacacagtaggtgcaaaataaatttttttttttttttttgtgagatggagtctttctgtgtcacccaggctggcatgcattggcgtgatctcggttcactgcacatcatccacctcccggttcaagcgattatcatgcctcagcctcctgagtagctgggattacaggcacgaaccaccacgcccagctaattttgtatttttagtagagacagggtttctccatgttgatcagggtggtctcaaactcccctcctcaggtcatccgcccgcctcggcctcccaaagtgctgggattacaggtgtaagccgctgcgcccggcagatattctgaatcttgaaggaggaataggaattgactctgggctaagctggcagagaagggtattcccggaagagagatgaggattatgatgcatagaggcaagagaacctggtgtgttgggaactgcaattgtaaggtatgagtggacgagtggcgagagactagaatggcctggtacccagtcaacatgcctacaacagacggggctgggaaaagagctcctaggtgaggacaatttctcagacatgagaatggccagggcagttaggtgaactctagtacagatgtacacactggacaatttaactaagaacaattcatgtgtctttacaaagggttatctttccagctgttacttcctctcttccagctcatctgttggccaccttgttgtttacccctttgagtaaaaataagcaaaaagccagaagaatggggtaacctcaaatacctccttaattttgttttttgagcagctgcttaaaatgtctgaaacattttttgagttagaaatctgaaacaaaacaaggcttccaaatgattcatgagtttccattattcaagtttccctcatatcttcatcaccgtgtaggtaatgggtgtgaatctctgtgtgctcatatacatatgcttgattatatgatcatctcgtggaggacatgtgacacgggaagacaatagggcacatgatatgctctttgatctaaggtaagagtagcttctctctcctccctgtttcactatggctttatggacatgtgggcacacagaagaagcagaccgcactgcagaggctgtgcttatagacataactgcttctcaaggccacagataagaggatggacaggattgaggtaagtctatattttggcagacaagaactcttggtggcctctccattcagtgctagaatgttcctactatcacaccacttagttgatgtttgtgatttcaagtgctcaagtggtcagctcctctgataccactcctatgacactaaggggtcaccaggaatatttgtggccatgggcatatgagctccaagaaataaaagattcattaagggctgccatagagattttctggttcttttgtgacttgagctgaaattgtaagacctgtgtgtgtcatttcctttctgtaagtactctagtcctcccaggagcagcctcctgctccactgcctttggagctatcactactgccataagaaccaaggacagtagctatttgttcccgagacacttggtgcactatccacagtgacccatagcaataaagttaatttcaatacaactacctatgaaaaaggaaagtgaaggatgtgtctaaaacaaccctggaaccccatctttgaggatctgttttgtacgaccactcctggacactagcgtatgagttatttttctgagataatttaagagaattgtttaagtagggtatgagatttctagggcttccataagaaatgccactcgctgggtgacttaaacaacagacatttattttctcccagttcgggaggctggaagcctaagatcaagatgttggtggggttgatttcctccgagaaccatgaggggaggagttgtttgtggcctctcccctccccttgtaggtggctgtcttctccctgtgtcttcacatggtcttccctctgtgcctgtctgtgccccaatcttttcttacaaggacaccagttatatgggattagggcccaccccaatgacctcattttaacttaattctttatatacactatctccaatcatcagtcactttctgaggttctgggggtttagaacttcaacctgtgaatttttggtggggcacagttcagcctgtaacaaacagatataggaggactgaaaaggcaaggcaagggggaaacattgaaataacaaacatagtaattgcaagaagcaactaccataaccttaggactagaggaataaaaggaagaggctggagtcatgagaacttagcagcttggagaaggagtcttacaggactggtgcccagaactctgaggggcagagggtatgagcagctggtactggcaagtatgaggggtagacaaacagacagatgccgggagcatgggataaatggagaggagcgtttcctttctctcccctttcatcttcagatcttgcttttgtgcccctcgtaggcaggacctaacaggtgtccgctggcaaaaaagaagtgtaatctgcagcctacagcatgacaggccatgttattgaaggatggatttttactaagacacaataactttaataaccaacacaggctgggcgtggtggctcacacctgtaatcctagcactttgagaggctgacgtaggtggattgtttgagaccaggagtttgagaccagcctgggcaacatggtaaaacccctactctacaaaaaggacaaaagttatccgggcatggtggtgtgtgcctgtagtcccagctactcacaaggcagaggcaagagaattgagcctgggagttcgagactgcagtgagctatgatcacaccactgcactccagcctgggtgacagagtgaaaccctgtctcaaagaaaagaaaagaaaaaagaaaataagcagcacagattccttcagcttcttttaaaaagtcgtatcttgctctgcagccttgcttttattacttagcagcacatacgaaaaagtctccagtgtccatcctcttccagcacatgaattctaatggctgcagagtatattccatcataaggatgtatcatcacttacttaaccaacttcctattcttagccattcggtgttttaaaattttgccactcttataaataggactgcaactcaataaatctaagcacacatccttaagtaatcccttaggattaatttttgaagtggaattactaaatcaaaaagtatgaggatttttcaggataaaaactcacttttctcagctatggaaaacgtgaattaagtgtggcttcttctgtcctgtagtacagtagggtgagattacaatgtactagaacatggggttgaggcaaggatttaaatactattggccgaaactgagtaataggatgtaatgatttcagagtgaaactaggcctactctttatgaaagcatttaaaggtgaggggacagttaacagtagcatctgccccagctggtggaaacgccatgttgttactgattttaatgcagttgcattcttagcagaactaattttgtaaagcatttctctaaataatccaattttacttggtgcttatggttggacaaaggagcaggcaggttttgtatcagtatttatggagtgtagccttgtaggaattactctggccagaggacattgctataaatctataatgatggttgtgtttttgattccatctttagtttctgaatttcagcctttgtaattaaaaatccatatcataaaattttggcctgtgacaattttatttttctcctgggatgctatgatttttctgaggcatgccttgctcggtccttcatggaggctaaaggtctgggggattttgagctgggtgtttggagcccatcctcatgacagatatttggcatgccagcttgggtgctacccttggaagatccgagtccaagcttttactggctccctgaggacaattctgagaaagttactatcccttgtactggtttctggtgctgggtatatacttgcttttgtaagactaaataaattgataaattcagctgattcagagcgtttacataatctttccaatgtcaacagtcatttaaattatcctaactttatactgaatctccaaaatccaattactagctaataataattgtcagttttactttaaacctttaatgataggtcacaagggaagtgtagcagcaggattaaatcgctgtagactgtagctatgcccagtcttaaattactcgcctcttatctctggctaacagagccactatatgttttgtcaccatttttgctaaatagaatatatgtcaccaaaattaatttcatctcccttaaattagcttcttagtgtgatttctcacttcagtcaaaatttatttcttcaggaatttaatttccttcttcatctcttttattcgagagagcaagactgttctggaacaaatgtcgtttaatcactggctggcaagttttgaggcttgcttttcattaataattgctgacccctttagggggagtgttggaggatatttctgttttatttaagctattgtatgcttttaaacagagtagactgggctctttctgaatagtcttagagaagctgtaaaccttgcatagaacaggaaagatgaatttaccacaaagaaaacatttttttcacatgagggatgattcagcagggagtttgtaattaggcactttagttgtttttcctactttttaatcattttcaggtatacacatctgacaatagctatcctttaagtaaggcatgtgtttggaaaaaactgtagggatttaaaagttaaacttctcacagaacacataaatacacagaagacttgcccaactctgaaatgcatcctgaagatacgatagtagcacctgtaacaaattccctttgctcatcaacagaaacctcaaggcactaaaacattaagaggcatggagagggagaagagagaggaagtgagaaagagagggaaagagagggagagggaaagatccatttctagaaaggcaaagtgcgaggagctctgtgacctgctccccagtgaagcaaatgtaactggtgaagataatgaaaaaatatccaaccattcggagtctctggatattgtactaggagaatacagcaaatgaagaaacagttatttaagagcaactactaaaactcaaaaggaacaatgggattctgtggcacttaaaccatgacctgttcctttcctcctccccgcagcttactttgaaggaagctctctattacaggtaggtgtggctaagaaggtggggctcccttgcccctcatctcccaatcaagggatatggcatcttacccagaagagcaggctgccaacatttcttattccctccgactctgagatgcagaagttaagttcctggtgaggtcagccaagaagtcagagactactgttctctgcccactccccccaactcaaatgtggcagttctaccacaggtgaagctaactgagaacacttgggccctcatcattcttgctcaagaatgatggggtggagggtccacactgggagaggcaagctgagaagactggagagtgtcatatctgcctcagtctctggagcagtggcttggaggtttttctcagtgggagagcagtccataaatacatagagctctgaagctctgaagctctccttaggggaactgtctttgaaacagagtgagggaagttcaaggctaagggtactttcttccataatgaagattttggtggtaattaagaggagactaataactccatgagagcaaaaacttacaccagaggcaagcaagtttactagagagaaccatggaaacagatagctaagaactctcctgggttcacaaaaaacctaaaggactagcctcaaaaacttcccctacccatgtacaattcagtggcatctataacattcacagtattgtgcaatcatcaccactatctctttccaaaacactgtcatcatcccaagaagaaactctagaatgattaaaccaacaacttcccatcccttctcccctatgatcatggattaacaattagctttcattagaaacaatggagaccagaaaccaataggatggcataatcaaagtgctggaaaaaaaataaaaaaactatcaagcaacaatcttatatccagcaaaactctctttcaaatatgaaggtgaaataaagacatttctaagtaaacaaaaactgagaagctttatttgctagcagacttcctttacaagaaatactaagggaagtaatacaggctgaaagcagtacaccccagacattaattcaaaaccacacgaataaacaaaaagcaccagtaaaggtaattatataataataaaaagatagtataaatacatattctcctttctgcccttaactaatttaaaaagcaattgtacgtaagcatggaattaccatataatctagcattttttacttctaggtatacaccccaaagaactgaaaacaagaactcaaacagatacttgtacacctatgttcatagcagccttattcacatggacaaaaggtagaaacaacccaaatgtccatcaagggattaatggataaaaaatgttggatatacgtacaatgtaatagtattcagccataaaaaggaatgatgtactgatatataatacaatatagttgggaaaagattattctaagtgaaataagctagactcaaaaggataaatattataggaatccacttaattgaggtatctaaaataggcaaatacatagagacagaaagcagaatagaatagaggttaacaaggactggtagcagaagggaagagtgaggacttgccagggagagaagagtaggcagttatagtttaataggtacagaattgcttttgggaaaataaaaatattctggaaatgtatactggtaatggttacacaaaattttaaatgtacctaacaccactgaattatgcacaataatgacaaaaatggtaaattttgttatgcacgttaaccacaataaaaataattaactctaaaaaagcaattatataaaataatatgtatgtaattatattattgggcttatatgtaaatgtaatatatttgacagtaacagcacaatggagatgggtgggaggaaacctgtattggtgtaaggaaatggcgccagatggtaacccaaatctataggaacaaatgaaaagaatcagaaatgataaatagaaagggaaatataacaagctctatgaatatatgcttactctcttctattctcttagcttctttaatagacataaaattatataaataataaaatgtattggtaggtttgtaatatatttaaatataatgtgtataacaatattagcacaaaaggaggaagatggaacagagctatataggtgcaattttaaaattttttgtgaaattaagttagcatatatctgaaagagattctgatgagttaaccactaataaaatctaataaaataactcaaaatatagcgaaaaattattaaagaaattatattacactagaaatattcacttaaagcaaaaggaagcagtaaagaaggaacagggaagcaaacacacatggggcatataggaaacaactgaaatggaatatgtaaatcctatataaataataatatcaaatataaatggattaagcaactgaatcaatagtcagagattttcagaatggataaaaaaacaaaatccaactataggttgtttataaaacacacactttagattcaaagatacagatagtttgaaagtaaaagaattgaaaagatgtatcatgcaaacaacaacaataagaaaattggagtggctatacgaatagcagaaaaaaatagactttaagacagaaaaagttactagagtaaaagaggacattttgtgatgataaaagtgtcaatttgtcaggtatgtaaaacaatcataaacatatagacatggctacatagccacagagccccaaaatacacgaaggaaaaactgacagaccagaagggaaaaataagctttcaacaataatagttgtagtgttcaataccccactcttaataacagatagaacaactagacaaaatatcaaggaaatagaagacttggacaacactataaaccaacttgacctaccagacatctgtagaccttccacccagcaacatcagaatgcacactcttctcaagaacatggaatagtctctaggatagaccatatattaggccataaaacaagcctcaataaatttaactgggtaaatcatgcagagtgtgttctctgataacaatagagtgaaaataaaaattaataaatttggggaattctcaaatatgtagaatataacacattgctgaattgccattagtcaaagaagaagcaataaagaaagttgaaaaacactttgagatgaatgaaaaagacacacaacataccaaaagttacagggtgcagctaaagctaaagtaaacagagggaaatttgtggttgtaaatgctactacaaactgagaaaagagttatctattcaataacttgattttccaccttaagacagtagaaaaacaagagaaaactaaactcaaagaagatagaaaccataaagagcagaagttaatgaaataaagaataaaaagcaatgaaaaaattaataaacccaaaagtttttctttaaaaggatcaacaaaaatgccaagtagttagctagattgaccaagaagactcaaatgattaaaatcaggaatgaaagagggagcattactatcaacctgacagaaataaaggattgtaaggcagtactatgatcaattaaatgccaatgaattagataacttggatgaaatggacaaatttctaaagacagactcaagaagaaatagaacatttgaatggacctatagaaagttaattgattgagtttgtaaacaaacaaacaaaaaacaaccgtctacaaaaaaagaccccgggcccagaatttacttcactggtaaattctatcaagcatttaaagaaagtaaatgttaattcttcacaaagtcttcccaaaatagagaagggaatacttcccaatttattctctgagcccaccatcattctgattcctaaaccagaaaaaggcatcataagaaagaaaaatatgatatttcgtgaaatgaaaaatccttaacaaattattagcacatcccatctagcaatgtgtacaaatattacacacaatgaccaagtaggatttatttcggtaatgcaagattaatttaacattacaaaaccaattaacataatacaccatatcagaagaataaaggacaaaaaccacatgactatctccacaccattaaaaaaaaagtatttgacaaaagtccacatccacacacattcatggtaaaaacattcaacaaactaggaaaagaaagcttccccaacgcgataaaggacatctgtgaaaaactcttggttaccatcgtacttaatgggaaaagattgaatgttttcccccctatgatcaggaacaagaccaagaaatccactatctccacttttatttaacattacagttaaagtgttagcccagaaattagacaagaaaacaaaatcaactggatgcagattggaaagaaagaagtaatagtatttacttgcagatcttgtatacaggaaattctaaggattctgctaaaaaaaaaaagaaaaaagaaaaactgctaaaacaaataaatgagttcagtaatgttgcagaatacaagaccaatgtagaaacatccatcgtaattgtgaaattaagaaaacaattccatttataatagcatcaaaagagtaaaagacttagaaataaacccaacaaaagaagtacaaaatctatgccctgaagaacaacaaaaacattcctgaaatacaatgaaaataacctaaataaatagaaatacatcctatgttcctggatgtaaagacaacagtactccacccacatttgatctacaggttcaacacaattgactctctagccccaatttcaaaacttattaaaagctacaataatcaagacagtgtggtactggcattggaatacacacatagatcaaaggaatagaactaggagtccagaaaaaagtcattgcatttacagtgaattgatttttgctgagagtacaaagataattcactgggggaaagcatagtaatttcaacaaatggcgctcaggtaactggatagtcacttgcaatagaatgcattaggaacctcgtgccatatacacctcacaccatctacaaagttaacttaatatattagtaaatcaaagccctaatatcaccactaaaagcataaaactcttagaagaaaacatagacataaatctgtgtgactttgggttaaggcagcagtgtcttaaatatgatatcaaaatcacaagggacaaaagaaaaaataagtaaattggacttcctcaaaatttaaaacttgggtgcctcaaagaacatcatcaggagtgtgaaaagataacctctagaactggagaaatttttataagtcatatatctgataaggtatccaaaatatataaagaacacctataactcaataataaaaagtcaattattatctcattttaaaaatggtcaaaggaattgaatatatttgtctccaaagaagatatagaaatagccaataaacacaccaccagaggctcaacatcattagccattaggaaaatgcaaatcaaaatcacagaaatatcacttcacatccactagaatggctataatcaaaaaagataaataataacaagtgtagggtgtggagaactggaaccctcatacattgctgttgagactgtaaaatgatgaagctgctttggaaaacagcttggcagtttcttaaaaggttaaatattgagcaattccactcctaggtatatacccaggagaggcgaaaacatacatacacaaatgcaaacaaaatttggtcattaatatctatagcagcattattcataatagtcaaagagtggaaataatctaaatgttcatcaattgatgagtgcataaataaaatgcagtatattcttacagtagaatatttggcaattaaaagaaatgaagtactgatatatgctacaatgtgggtaaaccttgaaaacattatgctaagtaaaaaaacccagttaccaatgaacatatatagcttaaggtaaattcatagagaccaaaagaatagtggttgcttagggatgaggaggctagggaaaagagtcagacattactgatggtgggcatgggatttcttttgggattgatgaaaatgttttcagattgtggtgatgattgcacaattctgtgaatatgcataaagttttgaatatatattttaacgtagtaaattttacgctatgtttattatatctcaataaaacttttatttaagaaaagatgaatacaggagcacccagatttataaagcaagtccttagagacctacaaagagacttagactcccacacaataataatgcaagactttaacaccccactgttaacattggacagatcaatgagacagaaagttaacaaggatatccaggaattgaattcagctctgcaccaagcagacctaatagacatctacagaactctccaccccaaatcaacagaatatacattcttctcagcaccacaccacacttattccaaaattaaccacatagttggaagtaaagcactcctcagcaaatgtaaaagaacagaaattataacaacctgtctctcagaccacagtgcaatcaaactagaactcaggattaagaaactcactcaaaaccgctcaactacatggaaactgaacaacctgctcctgaatgactacttggtacataacgaaatgaaggcagaaataaagatgttctttgaaaccaacgagaacaaagacacaacataccagaatctctgggacacatgtcaagcagtgtgtagagggaaatttatagcactaaatgcccacaagagaaagcaggaaagatctaaaagtgacaccctaacatcacaattaaaagaagtagagaagcaagaggaaacacattcaaaagctagcagaaggcaagaaataactaagatcagagcagaactgaaggagatagagacacaaaaaacccttcaaaaaatcaatgaatccaggagctggttttttgaaaagatcaacaaaactgatagaccgctagcaagactaataaagaataaaagagagaagaatcaaatagacgcaataaaaaatgacaaaggggatatcaccaccgatcccacagaaatacaaactactatcagagaatactataaacacctctacgcaaataaactagaaaatctagaagaactggataaattcctcagcacatacacactcccaagactaaaccaggaagaagcaaaatcacttaatagaccaaaaacaggctctgaaattgaggcaataattaatagcttaccaaccaaaaaaagtccagaaccagacggattcacagccgaattctaccagagttacaaggaggagctggtaccattccttcagaaactattccaatcaatagaaaaagagggaatcctcactaactcattttatgaggccagcatcatcctgataccaaagcctggcagagacacaataaaaaaagagaattttagaccaatatccctgataagcatcgatgcaaaaatcctcaataaaatactagcaaactgaatccagcagcacatcaaaaaccttatccaccatgatcaagtgggcttcattcctgggatgcaaggctggttcaacatatgcaaatcaataaatgtaatccagcatataaacagaaccaaagacaaacaccacatgattatctcaatagatgcagaaaaggcctttgacaaaattcaacagcccttcatgctaaaaactctcaataaattagttattgatgggacgtatctcaaaataataagagctatttatgacaaacccacagccattatcatactgaatgggcaaaaactggaagcattccctttgaaaatgggcacaagacagggatgccctctctcaccactcctattcaacatagtgttggaagttctggccagggcaatcaggcaggataaataaataaagggcattcaattaggaaaagaggaagtctaattgtccctgtttgcagatgacatcattgtatatctagaaaaccccatcgtctcagcccaaaatctccttaagctgataagcaacttcagcaaagtctcaggatacaaaatcaatgtgcaaaaatcacaagcattcttatacaccaataacagacaaacagagagccaaatcatgagtgaactcccattcacaattgcttcaaagagaataaaatacctaggaatccagcttacaagggatgtgaaggacctcttcaaggagaactacaaaccactgctcaacaaaataaaagaggagacaaacaaatggaagaatattccatgctcatggataggaagaatcaatatcgtgaaaatggccatactgcccaaggtaatttatagattcaatgccatccccatcaagctaccaatgactttcttcacagaattggaaaaaactactttaaagttcatatggaaccgaaaaagagcccgcatcgccaaggcaatcctaagccgaaagaacaaagctggaggcatcacactacctgacttcaaactatactacaaggctacagtaaccaaaacagcatggtactggtaccaaagcagagatatagaccaatggaacagaacagagccctcagaaataataccacacatgtacaactctctgatctttgacaaacttgacaaaaacaagaaatggggaaaggattccctatttaacaaatggtgctgggaaaactggctagccatatgtagaaagctgaaactggatcctttccttacaccttatagaaaaattaaatcaagatggattaaagagttaaatgttagacctaaaaccataaaaaccctagaagaaaacctaggcaataccattgaggacataggcacgggcaaggacttcatgtctaaaacaccaaaagcaatggcaacaaaagccaaaattgagaaatgggatctaattaaactcaagagcttctgcacagcaaaagaaactaccatcagagtgaataggcaacctacagatgggaaaaaatttttgcaatctactcatctgacaaagggctaatatccagaatctacaatgaactccaacaaatttacaagaaaaaaacaaccccatcaaaaagtaggcgaaggatatgaacagacacttctcaaaagaagacatttatgcagccaacagacacgtgaaaaaatgctcatcttcactggccatcagagaaatgcaaatcaaaacccaatgagataccatctcacaccagttcgaatgtcgatcattaaaaagtcaggaaacaacaggtgctggagaggatgtggagaaataggaagagttttacactgttgatgggactgtaaactagttcaaccattgtggaagtcagtgtggcaattcctcagggatctagaactagaaatatcatttgacccagccatcccattactgggtatatacccaaaggattataaatgatgctgctataaagacacatgtacacgtatgtttattacagcactattcacaatagcaaagacttggaagcaacccaaatgtccaacaatgatagactggattaagaaaatgtggcacatatacaccatggaatactatgcagccataaaaaatgatgagttcatgtcctttgtagggacatggatgaagctggaaaccgtcattctcagcaaactatatcaaggagaaaaaaacaaacactgcatgttctcacttataggtgggaattgaacaatgagaacacttcgacacaggaaggggaacatcacacaccaaggcctgttgtggggtgtgggggaggggggagggatagcattaggagatatacctaatgtaaatgactagttaatgggtgcagcacaccaacatggcacatgtatacagatgtaacaaacctgcacgttgtacacatgtatcctagaacttaaagtataataaaaatatatatataaataaaaaaagatcacaaactaaatattgagcttataaaataaattagaatgaaaggtttcataataaaaaaagactaaaatagaagttggaaacattggatgcaatcctatatttgctttttcctaccaatatgactttggaaaattttcttatttgtggaccttagctttcttatcttatgataatgtttgcaccagcaaggtcttagaggaggtactaggcaatgtggggcaagggagagcgactttattagtggttacagtgaccaaagagggctcctctcacaaagccagcttcatggtgtgtaacctgtgcagtcacaccccacgccatgctcagaagggcccaggcttggtttaattctctgctgtatgttttgaacaagggttcctgcattttcattttggggggtcctatgaagaatgtaaccaattctgatcctactgatagtgagaaggggctagggagcctttaatgtcctgcagagcacagggcagccctgtgcagtgaataattgccctgtccaaaatgccctgatgagaaacaccaaatgctaagtcatggttgaactctgaagggctgcaatttttaactagcttactagaacctaatctgaaatgttcaagaatagtgtgtgtttttcaaaaaatttgctttgatttatttcatgtacctaaaaagagtatgacgggtcgaaggcgactgaacatttagttcctcattttttttcctgagactgataatataccctatatgagccttatatgctttgaccttgcttctcatccattaactgagctgttgaagtttagatgattatagccttaacttattttatttctggttattagatttgttaagaaattgccaactcagtaggctctgtggcaaaaacaattatgattcctggagaatctctgatgaataataacgttctaagctgagcattttacttacattatttcatttaattttcccatcaatcttttaggttgatcattattatcctaactttatagataaggaaactgagtctcagagggcttaagaaagattagatgaaaatgatgtgtcttcttttttgacttctcaactgctattagatgaaacctgaaatccgtgagtttctttcattccttgaattttcccccagatgtattaggcctcactggaagaattaatgttggaatctactgatatatgttactgttatatacttatactgtagtaagcccctaagttggtgatattttcatgttgcaccaaaatttattatctacttggttgagaatataatactgtacatgataaaaatatactgaattaggaagtgcaagatttaatcatttctgaagtcatagaatagtagagctggaagaaattttaaagcactcctgtgccaatccatacatttcacagatgttgaaactgaggttaagataggtttaatattttttctgtattcacataatagatgtatggctttagtgacaaagccaggaatataatttatgagttaaagtgaattattggctcatcactcttcccaaacatttccttgcctccctttggtcagttttatctagatgaaataaaacaaccaatttgatggtttgacagatttcttcttcaatggaaataacttgcatggagtttagatagtctgtggatttcctgtaatatgggagttgtaacattttggagcatgtttaactcaacatagaggtgtcctctttcaaaaggacttcaacttaggtttgactctatgaataacccagcgaaaaataatttcccagtaagttcgaagaataccttaaaggtaatcatatgtattgagaaacagtaagtcctgccattgggacagcgactcaatggtatgaataataggatgaaaaagaaattgaggcatttagggaggttagaagggatattctaatttatatttttggatcaatttagaattcagaagcacttatttgtagcttattgatattcactttttgggtccattaagatgtaaagatggtcaattttataaattaatgtggatcatgaggacttctagatttcctcctgctttctacaattctattaaatgatatttaaaccaaggagataaagcttacgtatattttctttattcaactgtagacttaaaagaaaataaaactcttcaagatacatctcagacccagtgtttgatttttagattgtagccttgatatgctcagccttctccttctcaggcctctgcaatgggcctgaaatgaccttttattggcctggttcctttgatgaatgaactcagcacatttttgacagagatgaaggctggcttttttaaggccttctttagggagatataaatctcttgctgctttggagctgcatactgtttataaaccaaacttcatgcttccaaaatgagaaaactttcctccttctagtcttgcagggtctcacaaggatcactgcgcatgtttatcagcatttaaaagaaatagctaattatggggagtggtctaactaattgggcaaaggtctcaggtatacatttagctcttattttttatctccaactttctttgtgcaataggaaaacagattaatgtttttctttcttaattcaacttacagaaaatgtagggtcagattaactcataagaccctgcatcccagttcataagtcctttccaataacaagcccttctctatactgggcttctctaatatttcctaaggtgctgaccatcagccatccttacttcttattgcattcatactccttgggtaatacattcatttcatgaccccaaacattatatacctcattgactcgcaaatgtgtatttcatgacctccatgtattgcttgatctgcaaactatgttttcaactgactgttagatgtttccacctagatttccttcaggaacctcccagttaaacagaaatcattatcattcttgtgtcaacaccacccgtctctgcctgtccaattttttctcttcatatattttccttcttggttcataacatgataatcttatccagtttgggcaattgaagtaacttagataaatcctcagctcttctctcttgccacccattttataggtcattaaatatgccttttgggcactttttattgaagtattaacatacatttataagtatttacaaattttaagtgtgcagttcattgaatgttcacaaagtgaacagacctgcaaccagtaactaaattattcgcacacttaaatcccccttttaccccactgtcttcattatctctgcccatcaggggtacttcttacttagcatttaataaaatagaatagttggcctgtttttgaacttaagataagtggaaccatactgtatgtattctttttgtctggatacttcgggccaaaattatgtttataaaattcatccatgttgttgcatgtagcagaactttgttcattctgattgtctagtatgtgctggatgaatatttcacagttcattgagtcattctactgttgatgatggacatttgatttgcttccagtttggggctatagtcatgttgcaatgagcattctcatacctgtcatttagttcacatatttatatatccctgctgagaaaacacaaggtcttgctgtgaatagaatgtgcatttgttcagcattagcagatgttgccagatagttttttaaagtggttgtaccagctcacattattcagttcaattcagcagttgttccatacagcatgttgttcaataccaattcagcagcatatgagaattttcggtttctccacatgctcactaatactgggtattatgagccttgctcatttttggcataatgttccatatgaagtggtagctcatcatatagttctcatttgcattttccctgttggctgatgaagttgaacactctttcatacatttcttgaccatttaaatttcctctattgtgaaatggattttcagtctttgttcattttttaaaattgaattatcttattatgtcctagtttcaagttctgcatcagattatgaattgcagtttttccttcccacattgtagtttgcatttttcattcccttaatggtgtattttgatgaacagaagttcttaattttaatgtagcacaatttatcattgctcccttaatgatgagtgtttttaattatctatttaagaaatattagctatgttttacaacatttaaaaactcatttgatggtagtatacagacaatgacactctgatgggtaaaaggcagaactctttgttactggcagctccaaatcagagaaggctgccaggcagggccccataggggatttcacccaagaccatggtaacaacaagctggagctacacggggcagcttatggtaagcaggatgtgtttagctaggtcttccaagcttctcacggattgcctaatctgaatgatctccggggctccagtgtatagggactatccttaattgtttcctacctggttctggggcaataggggcaggcgcacagtggccttagtgtgtgagatcaaaatagtagaaatagttgaagtgtggctttaatcagctgctcagaaaggaaaactgattgtcctctagccagggcttcaggactgggtcaagaaaccattaaaaaaaaaaaaaaagcaaatgtacagactaccataagaagcattgctttattttccatatttaggtctagagttaatctgaagttaacttttttatgtgaactgggtgcaagattcattattgtccacatggatagctacttgattcatcacaatttattggaaaaaagttccatttgcaaccatgatgcagctgtttatttacctctctttctactaataccatgccatagtaattactatagctttataactacagcatctgtagggatcttgatgtcttaacatctgctcatgttactctttcagctgctgttgtacatttgccgttttcattgtcatatgctcttcctccttcttttccctcatccccattccctttcccttcttcttcctcctctttctcccttttcttactttttcttgtcccatcctccttcttcttcctctcattctccttcttctctttctctttttctcctttacttcctcctcctccatcttctcctccttctccttctacttgtcattcttcttttcctccaatttttccttaactgttttagaaattatttagaagttctttgcctttctatagaaatcttaaaggacatttctcaaaatcccaacattttaattagggtagcaatgaaacaatagagcagttcaggggaagaaatgacatctttataatatgagtctttcattccatgaacatgatatggctttctattgatttggtcatctttgattttctcctttggtgcttggtagttttcaacatagaatcctgtatgtattttgttagatttatacttcaatatttttgagccatttaaatggtattgcttttatttaatttctactgttgtacagataaaactgatttttgtataatgatctttaatctgtgatcctgataaaatcattttagttttatgtagttttctgtaaattctattaggttatctatatagacaatcatgtcatacacagatagagacatattatatctaacttaattggatttgtttatttctgtttatttatttctccttgcagtcctagtacttttttgcctcatgtattttgatgctctgttgtcaggtgcatacctgataagtactcctacactttctcggagaattcactcttttaccattgtataatgtccctctttatctccgataattttcctttactaaagtcagctttgtctgaaattaaggtatctagtacagctttctttcgttagtattagtgtatctttacatatcccattttcaacctgtttctgtatttatacttaaaatagtttttctatagaccacatgtaattgggtcttgttttttatctgcttcaacaatctctttcctataataggtatatttagactattttcatttacagtgattaccgacatagttggattaacatctaccatgtttgtaacttttccacttattgaacttgttcgttgtttcttttccccctctttttctgcctgccctatttttgactgagcattttatatgattctatatctctcctcttttatcatatcaactatatttctttaaaaatttttgtagtggttgacttaaagtttgtaatacacgtttacagctattctaagtttgacttcaaatagcactataccacattatggatagtgtgggtaccacataacagagtattcataattatttcacttatcctctatgaaattgctgtcattcatttcacttattcatatagtgttatcaccgaatacagtgctactattattacattaaccaaggagttatcttttagatcaattaaaattttttaaaaaatattttattttacctttgtttattctttccccaacactcttcctttcttcatatctatctggatttctgacatttgtcactttctttttccttcaataattattttaacatttctcatagaataagtttactggcaatgaatttttcagatttgtttgtgggagtctttatttcttccttactattgaaggataactccactgaaatatagaagtacctctttttgcttgcatagtttctgataagacatctactttaattcttattctgtttctctctcggggttttttactactgtgtctattagaagctttagtttgggactgctatagctcccaggctaggatatataaaaggcaaaaatgaaactatacaaacagaaaaagccaaacaggggctcactgaatctttctttgagtactgagatccttattcagttatcctgttgtgatccctttcagaatattctaatagatgcttcattatgcattttactccagagtttttggttacagatatggaggaaatagagtgacatatgcttactctatgttgtttgaaaccagaagtgacatttttaatactatgtgtgtgaggctaagtttcttgttaatatcctctgatacatagaaaattttttaaagccggcaatccacccagtgatatccataccgcaagttctgttttgccttctgtaggtggtaattccaatgtcaattaagtttgcacagccttttctatattccctgaagctgcccagtgcatgcattagtcaaggcttcatctaggacttgggccatggattatattgtggatcattctggataccttcactgcggtggtttttgtttagatttgttttgttttttggctctgtgctgcacgtacataggtcaagtttgattctgcatcttatgccatatcatacacaaaattagaggactctgttatctagctgtctcttaggtttttcctacaatttaggactctgaagagtcccttttcctgattattttggctaaaaatttgggtttctttcagggttttattactctacactgtcacacagtggggaccttctttaggttcttactgggactttgtttggagagatgtagtgggaattttaaaaaagagaaaactgatggataccacctccccactctttggacaacagaggctactttcctagtaactgtctcaggaaacaagtcctctttctgggttttatgccattatgctgctgccactgccacagctgccatggaagctcaggtctctggatgacactggccttgggagaggtctagaagggaaaagaagagaagggaaaagtgaatattctttggtcttggggggctcccagatacagttttaactacttctacttggacaactaataaagatgctaaagatgaacaggttattattgtgttgctagatatgtagattaagggcaatctactcttacttaaactttagataagatggaaattttttttcttgggcagtaacaacattaagaacggtgatgatgaaagtgtggttcatgatccagctgcatgaagtccctctatgaaggatgttgaatgtgcatatttctaggccttaactttggctcttgaatcttgattcctagatttgcattctgtattcctgtacacactaaagatttaagacattacttttagatggtgatgaacccctaagtcattgaagtttaagagaccagtagatgattatattattgtatgcggaagatatcaggggcttgaagttgggcctaggcaacagaaatgaaaaatacagggaaaatagaagagatattattgaggtaaggaggacacctgggaactgattaacccttgaaggtaaagaaggggtatgttaaaagatgactcagaggaagtattttggatgcatgtgagaatgatgataccataataagataagggaatgtcaaagtaaactctagatgatttaattagactggatttgagtatggggatttgagtaattctggcatgtctgtatggggtttttgagactctgtttaaggtagggttagtataagacacaccttccaagaatttacaatctgttagtgggattgagaaataaggaaaaaaacaactaaagctaacttggattgagctctttctatatgccaaacacaaatgatgttctaaacattttacatagataggttacgcaacttgcccaagatcacacagctactaagtgaaagagctgagatttaaaaccctgtgttctagactctatgcttttaatgtctatacaattaatattaccaaatttatggcaatttgacctctctagccatcagtttccttatttctaaattaaggataataatctggtagaatgtgtgtgataacaaaatgacaccatatacagaacctagaaatagtaggtgttcaaattgcatgatttagttctcatttttttaagtggttcagattttttaaaatgctgtttgaaaatactgtatctgtaactacaagaccagttttctaaactttcacttatttttggagatcttcatggtgcttcaataaaaattttataacactagaagaaaaaaattatctgtttttcttttccttttctatagctttgtagaactattattgaaagacaataaactacacatatttacagcatacaattgaataaatttggacttatatatatgagaaattatcatccctaaatttccctaatgacctttgaaattccttactccttccctgtctgcctctgcctctgagaaatcactaaatgacttatcttgttatagattatttcacattttctagactattatataaaaaatacaatatgtactgttttttctggcttctttcagtataattattttgagattcaaccatgtgtgtatcaatagttcatttaaaaatattattgctgacaaatatttcattgtgtagatatacaatagtttgtttcttcacattttgatgggcatttatgtcagtccaatttttaactttattaaaaataaagcagccatgaatattagtgtatgcatgctttcacatggtacatttacatttaactttttaagaaactgctaaactattttctaaaggaactgtaccattttacatttctaccagcagtgtctaagagttgcagttgctccaaatcctcaccaacacttggtatggtgagtctttttaattatcatattggtttgtgtatgttgaaccatccttgaatttgcgagatagatcctatttgatcatgatgaatgaagttttccatatgtggttgagtttggtttactagtattttcttggggatttttgcatcaatattcatcagggatattggcctatagttttctgtttttgatgtgtcttcatctggttttgatgtgtcttcatctggttttggtatcagaattgataccagaattagcatagcacgagtttagaagtattccctcttcctctattttttgtaatagtttgaataggattggtatttcttctttaaatatttgatagaattcagcagtgaatccatcaggtcccaggcttttctttgctgggagactttttattacagcttcgattttgttacttgttattggtcttttcagattttttatttcttcatggttcaattttggtaggtggtatatgtctagaaatttgtccattacttttagattttccaatttattggcatataattgctcatagtagccactaattatcctttacgttactgcaatatcaatagtaatgtctcatttttcatctctgatttttatttattttggtcatcgctctttttttcttaatctagctaaaggtttgtcaattttgtttaccttttcaaaaaaacaagctttaatttcattgatcttttgtattgtttttgcatttcaattttatttatttctgctctgatctttattatttattttcttctcctaattttgagttttgttgctcttgctcttctagcttctttaagacgcatccttaggttattcatttgaagtttttcttcttttctgatataggagcttatacactcccttgttagtactgctgtcatggtatctcctaggttttggtatgttgtgcttacattatcagtcatttcaaaaaatatttagattatactgcttgggtgataggtacaccaaaatctcacaaatcatcactaaagaatgtactcatgtaaacaaacactatctgttccccaattatatgtatatatatagcttccctcttcacttgacactcattctctctcctgctgccctgtgaagaggtgccttctgccatgattgtaagtttcctgaggcctcctcagccatgcagatctgtgagtcagttaaacctctttcctttataaattacccagtctcaggtattcataataaaatgaaaataaaaataaatttattcattaatttattcattgacccactggtcattcaggagcatattgtttaatttccagtgtttatatagtttctataattcttcttgttattgatttctagttttattccattgtgtcagagaagatgcttgatattagttcaatattttgagtgttttaagacttgttttgtcacctaacataagatttgtccttgagaatatgtgttctgagaagaatgtgtgttctgcagccgttagatgaaatattctgtaaatatctgttagatccatttggtctatagtccagtgtttctttgttatttttttggctggaagatctgtccaatgatgaaagtgaggtgctaaagtctccagctattattgtattagggtctctctctctctctctctctttagctctaatatttgcttcatatatctgggtactccagtgttcagtgcatatgtatttaaaattgttatattctcttgctgaattgaccctttttcattatacagtgatcttctttgtctcttcctatagtctttgtcttgaaatctattttgtctaatataagcatagctactcctgctcatttttggtttccattgacataggatatctttttccatcccttaattttcagtctatgtatgtctttataggtgaagtgtatttcctatagacaacagattattattattttttaatccattcagccactctgtgtcctttgattggagaattcagtccatttacatgtattattattgataaatagggacttgtttctggcattttgtgatttgttttctagttgttttgcggtcatctcttccttctttccttccttgctgtcttttagtgaaggtgattttctcttgtggtatgatttaacgtcttgctttgttttttgtttctattgtatatttttttatttgaggttacaaataatatgaggcttgcaaataatatcttataactcatcatttgaaactgatgacaacactaattgcatcaacaaacaaaaggaaaactaataaaaaatcagcacattaactttttcctcctgctttttaatttttttttgtttctatgtatattgtattataatctctatgtcttgaaaagttgttgtagttattatttttggttcattcatctttcgtcttcctacttagaataagaatagtttacataccacaattgcagtgttataatattctgtgtttttctgtgtacttagtaagaccagtgagttttataccttaagatgatatcttactgttctttaacagccttttcttcctgattaaagaactgcttttagcatttcttgtagggcagtctggtgttgatgaaatccctcagcttttgtttgttttggaaagtcttcaattctccttcatgtgaaggacattttcaccagataagctattctagcataaaagttttttttcctttggcactttaaattaatgttatgccactctttcctgacctgtaaaggtttcctctgaaaagtctcctgccagatgtgttgcagatccatggtgtgttatttttttctcttgctacttttaggatcctttctttatccttggcctttgggggtttgattattaaatgtcttgaggtagtcttctttgggttaaaccttcttagtgttctataaccttcttatacttgaatattgatagctttctctagtttaggaaagtcctctgttattatccctttgaataaactttctactcttgtctctttctctacctcctctttaaggccaattactcttagatttgctcttttgaggctattttctagattttataggtgtgcttcattattttttattctttgttaatcttttttcttttatattctctgactgtatatttctaaatggcctgtcttcaatctcactgattctttcttctgcttatcagctctgctgataggagactctgatgcattcttccttatgtcaattgcatttttcaactccagaatttctgcttgtttcttttaaagtacttgaatctctttgttaaatttatctgataaaattctgaattccttctcttcgttatcttgaatttctttgagcttcctcgaaacagctattttgaattctctgtctgaaaggtcacatagctctgtttctccagaattggtccctggtggttttttaagttcactttgtgaggtcatgttttcctggattgtctcaatgcttgtgggtgttagtcactgtctgggcattcaagtagtagatatttattatagtcttcatagtctgggcttgttggtacccatccttcttggatagtctttccaagtgtttgatgagatttgagtgttgtaatctaagccatatctacattaaggaacacgccaaacccataacactatgcttcttgcagactcatagagataccaccttggtggtcttcagtaagagctggaagaattttctggtttactaggcaaagactcttgttctcttcccttactttctcccaaacaaatggagtttccctctgtgtgctgagctgccatcaaaactgggactctgttgggttagaccttgtattaattcgttttcatactgctatgaagaaatacctgagactgggtaatttacaaaggaaagaggtttaattgactcacagttctgcatggctggggaggcctcaggaaacttacaatcatggcagaaggtgcctcttcacagggcagaaggagagagaatgagtgctgacgaagaaggaagccctttataaaaccatcagatctcctgagaactaattcactatcatgagacacagcatgggggaaaccacctccatgattcaattcttcaatcatgattcaagggtcctgccttgacatgtgggaattattacaattcaaggtgagatttggatggggacacagagccaaaccatatcagacctgaagccagcacagcactgagtctcacccaaggtccactgtaaccactacctggttaccacatgtgattgttcaaggccccagggctctacaatcagcaggtataaatccagccagactcgtgttcctctaggacacagatgggtccagagatgccatctgggagtcagagattggagtgaaaaaccttagaaatctacctgatgctttatttattgcacctaagctggcactcaaaccatgaaacaaagttgtttccactcttcccttccctttccacgggtagatgagccgctccctattgtcaccattaccacaggcccatgaggagtactgccagtttaccaccaatgttcgcttaagactcaagggctcttgggtcagcttgtggtgaatgctgccaggcctgggacccattcttcagggcaatgggttcccactctggctcagggtaggtccagaaatgccatcaaagagccaaggcctggaatcagggatgatcccatttttaagaagattatcctttgcttattgaattgccttggcatctttgtaaaacggtattcaattatgtacgtatacatgtgagtatatttctagacgttctgttttctttcattaacctatatttctatcttaatgccaatatcacatagtcttcatttatatagctttatatttagtcttaaataaatcagggtaagttctccaagttgttcaccgtttttgaagttgttttagctattttaggtcccttgcatttctatggcaattttagaatcagtttgccaatgtctaaaaaaaatcctgctagaattttgattgggattgtcttaaatctatagaaaaatttgagtaatattaaaatattgtttcaatccatgcacatattatatttctcttgtttttagatttatttctctcagcaacatcttatagctttgtttataaattgatcccttaatttcatatttctgtgctattctttgatttctgacagtttattgcttttatatgtacctttaattgatttttatgtgttgatcttgtattatgttacttacataaactcattttatagtcccagaagattcttttgtacatttggtgtgattttctgtatagctgatcatgtcttttgcaaataataacagttttctttctttctttccaatgtagttggactgttattgcacttgtttctgtttctttccttattgcactggtttaaacctccagtcatatgtctaacagaagtggggaagtggccatccttgtcaactttctgatcgtaggtagagtttttaactaaaaatttagtttttaaaatacacgatactactcaggctacatagctttttttttttttttaaatgactgttaatgttttgtaatttaaaaaaattttcaattttttcttagttgttaaaattattgacatgaaattgtttacaatgtccccttattatcccttaaatttccatagcatgatgtcacctcattcattcctgatattgataatttatctattttcttatttttcctgactgagtctggctaaagttacatggtgtttgtagtctttctcaaggccaactttggtttcatagatctttcttttttgttgttctcactattatggatctttgttctttattattatttctctactgcttacttagtgtttaatttcttcttttacaagtttataaatgtggaaatggaagtcattgatttgagatctttctttttttctaatatgacctctaatggtaaaaattttgctctgagtaatttttgttgcatcccacaattttggtatgttgtattttaatttgcaatttgtttaaaatattctctaagtattttggactcatatctctatttaatattttgtttctaaatattttggggttttacagttacttttctgtcactgacttctaacattattttggccagaaaatattctttgtctttgtatctttcttaacaatgtcacaatgtctttcatatagcaaatttttaaaaaaattttcctgagctctagtatgtcacattttcctctgatgaattgtattttttgctatcaactctaagaactcttttcctagtcctggatcatggggattttatattctggaagttttagtgttttatactttacatttaagtgcataatctattgtgctaaaattgtataaattgtgaggtttcgatggaggttcttttcatttcttatattttgttttgttttgctgatgaatgtccagctgcccatcataatttattgtaaactatctttctcttccattgaattgtttgttcctttattaaaaaataattgatcatatttgtgtagaacttttttgggttctgtatactgtttcattgattaatgtatctatcttgccaccaatactatactatcttgattattagacatatataataaaccatgacattgaggagagagatttctcccactttattcttccttttctttcccatataaattcaagaatatgtttctttatgtctataaagaatcttattgacaatttgataggcattgcattaaacctatagatcttataggaaaaaatatttttattcaacaattccacagtatattgagtcttccaattcatgaacatggtatacctcttcttgtatttaggtcttttaaaattactttcacctgaaattataaaatttcagaattttgtaatttttttatacaaattgtatatatactttattagatttatacctaagtatttcatgtatttgggtaattgtaaatggtattacattagttatttcagattccacctgtccattttcagtatatagaaaatgcaattgatttgtttgtattaatcttgtgtcctgacaccttattgaacttgcttattaatttcaggagttcttttatagactccttgaagtgttttatatagacaattatgctgtcttgtaacagagactttttttttcttttccagtttacctgccttttattttacttatttactttttaacatattgcctttcaagacttgttagttgggataaaaacagccttaatctacagctaattttgcccccactatatagagccaatgcctttctgggtcttgtacccagtgcaccatggtttactagattttccactctagttggtgggaacatgaactatcccagctctgtgtaatgtctgaagattgtttcctctggtcctttcaggtagttttcttctagctcttttctaaaaactcatgtagttgcctcccacatatcccctgactagtattcagctgaagacttgcaggtaactctctgcaactttccagagcttttttgatacagctctatctgctgcagtaatctgcctattgagatctagtcatcttaccctcccagctccatctcagcaaactgaagcaatgcttgaaaatacctcatttgttttccctctattaggacacactgtcctacgttgctctatatccaatgtctttcgtatattttgttcagtattttagttgcttcaggtgggtggagggtgggtatgaaagtgattcctgttagtttatctggttggaattgaaagtatcataaaactctatgttgactcagtgtgtttttgaagcttattgggtcttgattattacatttcaaactctactatctgtaagcaaaagagacataggccaagttatccttgtaaagaactcataagaatttcctgacttacctggctgatgcttcctttggggacattgccttcatgatcatatgggtgttggagtgtttgtcatgccaaagagaatctgcatgtgtgactaataagtcagcatttcaagaggcctggctatactctgcttaaaagtgaaaaagcactggattggcaggcataacaaggagaaagtggcattgatatggtaatagtgactttttaatggtctaaggaaagattccctctattctttaactgtgcattggtggtagggtgttgtgtaggtttcttgtctgccaaggcaatgaacagatacattatggtcacttttgtggattataatagggaaaatgatgattcgaaggaaagttaaaaggtatttaataatgagaattgtattagctttcaaatatctgttttcccttcacttacttccttgttatctcttcactgggagatgtgcttccatggctttcatcttttttttcccctcttttaaaagatatttcaaactttcttttcatacatttctcttatatattttaggcaagtagaagaaacccaatgttgtctgcatttgtgtagtttatgtgtgcccaggcctatatgactagtgttttgataacacagaatcatgatctgctttgacattccaaaattatggaggagagaaagtaccactctttgcacccttgttttcttgtaggacccttaaagactaatattaaaacatttgcccttctcaagacaattcaacaccccctcttcttcaggtaatgtctgccaccatgcccaccacttcaactcaagtataccccactgactctattcagtagagagatggcaaaagtgtgaaattgtattctcttccccctatttcagttctctttttgaagaggaaaccaaccaaccaagtttatatcttgaaattactatctgtgggatatttgcagctgagactaagtcctagtgctttcttaataaaagctatgcatgtaaatagggtcagcttttgggctgacattgcatttgaattaaaatctggcatctccacaccattgacaaatctgacagctggagcagcagtcacctcatcatatctctcagttgtgtctttcctggtttttggcatccttcctgtctaaatttttatcagatgagcacttttccttggcaagtactttaaataccttcaacttgttttatctctgaactgtaaccctttgccctcagatgtcatatctcacatgtatgactggaggatattcagaacaaattagttaagaatgcaacaccagagtgcaatttcatttggtcttctccctgccccatcctcttcccaaatattggagcttcctgttgaagagacctttatggacattgattaatttcatggaagctacttaatggtcttgcaaattggaacagttgtaagttttgattgtgacactgcagggctaactccacctgtgctaagcattcagcattgttttctttggctttgcttcattcacgataatcaaggacttgggttcattaccagcattagcaagcctcaaaggcctctcataaatccaagccaaacactgtgttaggaggttccttagattaatggcagccctggttctctgaggctgtgttgagatctgagagaaggtaatgttcactcggcttcagcatttctacttgtagttcaaagccaaacctggaggtacaggatgatctgcaggcaacaagagatagaatgtgggcctgcaaaaggtaccacctgtatacatgatgagctcttcctgcctggcacgcaaagaactttagagttttcctcaagccttttcctatgaaaactctcaggttttgtcagctgggtcaatccattgcctttccaatacacctggagcatttcttccttgatgaattaagggctgaacaaggatgcatgtcaggggtgaaaccctttgaagagtgcaaaaataaaaattggttgtttagtaagtagaaagataaatcaaaaccaatctataaaagttagattcatatctcttttcagggtcacaatttgcctttgttttctagcatcttcatcggtgcttgcaactgaaatgggtcttcttttgactcttggtctttccttagttaagggtgagggagactctttggttctccagcggacaaaagaagacagctaacaaataagtcactctttcttccatagtctatttataagccttacaagttaatgctggaaaggccaatgagaagaaaaataaaacaacagtagtagtagtagtaataagcatgatcatcatcatcatcattggccgcatttttagagaatttgctatgtaccaggcactgttgaaaagaaaaataactttactgagatataatacacattcaataaaattcattcacttgaagtataacagttcagaagtttttaatatatttacagagttgtgcaactgtcaccactatctaatcttagaacatttttgtcacccccataagctgccctatatcatgagctgtcactctccattcctcttgagcccccaacccctgtcaagtactaatctactttctctatatatgtatttgcgcattctggacatttcacataaatgcaatcatatagtgtgatcttttgtgcctggtgtctttcacgtagcatgttttcaaggttcatcatattatagcccatgtcagtacttcagttctttttagagatgaataatattctattgtctaggtacagacatgccacattttgttaattaccatcagctgatgaatattttgactagaattcaggcattatacttttatttttaacctttcattttgaattaatttcacactgttgaaaaattagtaaaattatttcttatacacccttctcccagatttcccagttattaacagcttatataatcacagtacaatgatcaaacatcgatacaatactattatctcatctaaagaccttattcaaatttctccctctgttgtactaacattctttttctagcacaggatccaacccaggatcacatattgcatttaattatcatgtctccttagtctttttaaatctggaacatttcatcattttttaactttgagactttacatttttaactttaaatatatattatttttatgttatatattttttagaaatagggtctcactctgtaacctagactgagggcactggcatgattgtagcttactacagccccaaactccttggttcaagtgatcctcctgcctcagccttctgagtagctaggactacaggcatgtgatactgtacctggctaatatttaagatttttttgtttagagacaggattttgttttgttgccaaggctgatatcaaactcctggctttaagcaatccttctgtcccagcctcccaaaatgctggaattacaagtatcagccactgggcctggccttagttttatattttaaaagctaagcacgcttactgcagaagaatatataaaacatgtaagacagaatgaatagaaatcacccttatttcattaccattagatggtcactattgacaatttgatctatttctgtccttctattcatattattgaaaatataatttatattctcttttaaaccagcattatatcatgaccattttccatgcattaagaactcttaaaaaacataatagtttcataatggtccatcttgtggttaatacatactgccctccagcatatctgtgatattaaacatttaggttttctctggtgaaacaaaatgaaattagtcaatgtgtatgaactgttttaaggttactaatttgtattgctaaaatgacttccaaaatgatgatatcaatataaattcccttaggactctgtgaaagcctgtttcaccacaccatcctcagcactggggaaattcatctttttccaatgtttgaaaaattaaattccactgtgcctttagtttgcatttccttattagtgatattaacttttaaaaacagttatcaatttgtgtattttctttggtgaattgtctctttgtatgcaaaatataattttttaattataaaagaaatcaaggaaaaggtatgctttacacactatgcttattttctgcctttttttaaaaaaaaaataaaagtaacttcaacatttattttagattcagaggggtacatgtgcaggcttgttacatgggtctattgcgtgatgctgaggtttgggatatggatgatcccatcatgtaggtagtgagcatagtacctaagaggtagtttttcagcccacactccctttctccttctcctctctagtagtctccagtgttgatcgttgtttccatttgtatgtctatgtgtactcagttcttagctcccacttataagtgaaagcatgtggtatttggttttctggtcctgcattattttgtttaggattagcctgccgctgtatccatgttgctgcaaatgacatttcattatttgtatagctgtgcagcattctaaggtgaacatataccacagtttccttattcagtctactactgatgggcacttgggttgattccatgtctttggtattgtgaatggtgcagcaatgaacattcaagtacatgtgtctttttggtagaacaatttattttcttctgggtgtatacccagtaattgggttactggttgaatggtagctccgttttatgttctttgagaaatttacagactgccttccacagtggctggactaattttcattctgacagtgtgtaagcatttgcttttctccatggcctcaccagcatatgtcattttttgactttttaatatagcaattctgactggtgtgagatggttttccattgtggttttcatttgaatttctctaatgattagtgatgatgaggattttttcatgtttgttgtatgttttcttttgagatgtgtctgttcatgtccttttcccatttttgatgggattatttctttattgcttgttgatttttttaagttccctatagattctggatattaggtctttgttggatgcatagtttgtgaatatctgctcccattctttaggtagtttgtttgctctattgatagtttcttttgttgtacagaagttctttcgtttaattagggctcacttgtctatttttgttttagttacaattgcttttggggatttagcccaaaattctttgccaaggcctctgtcatgaagagtatttcctatgttgtcttccaggatttttatagtgtgaggtcttacatttaaatctttaatccattttgagttaattttttacatgtggtgaagggtagtggtccagcttcaatcttctgtatatggctagccagttatcccagcatcatttattgaaaagggagtccttttcccattgcctatttttgtcagccatgtcaaaaatcagatggttgtagttttgccactttatttctgtgttttcttttctcttccatttgtctatgtgtatgttttcataccagtagcaagctgttttgggtactgtggctttacaatatagattaaggtctggtagtgtggtgcctccagttttgttctttttgcttaggattgttttggctatttgagctctttttttgtttcatatgaattttaaaatagtttcttctaattctgtgaagaatgacattggcagtttgatagaagtaaccttgaatctataaatttctttgggcagtatggccatttttatattgcttcttctaatccatgaccatggaatgtttttccatttattcatgttgtctctgatttctttcaacagtgttttggagttctccttgtggagatatttcaccctcttggttagctgtgttcctaagtattttaatttctttgtagtgattgtaagtgggattgttttcttgatttcactctcagcctggacattgttggtttatagaaatgctgctgatttttgtacattgatctttgcatcctgaaactttactacaatttttccttttttttctttcttttttttttgctaaagtggtttatgaattttgggagccttttggcagagtctttagggttttctaggtatagaatcattttgtcagagaagatagtttgatttcttctttgcctatttggatgccttttatttctttctcttgactgattgctctggctagggcttccaatactattttgaataggagtggggagagtggacatatttgtcttgttacagttctcccagggaataatgctttcagcttttgtctcttcagtatgacattggctatgggtttgtcatagatggctcttattattttgaagtatgttcttttaacacatagtctgttgagtgtttttatcatgaagggatgttggattttatctaaagctttttctgcatctattgagatgatcctatggcttttggttttaattctgtttatgtgatggatcacatttattgatttgtatatattgaaccaacctcacatcacaggaataaagcctatttgatcttggcaaattaactttttaatgttgattcaccaagatcaagtagaatttattctggagcctacggactggcgctgacattgtagaatgagtaagggaggagcccctcatccctgattttttagaatagtttcagtaggattggtacccatttttctttgcatgtctggtaaaatttggctgagaatctatctggtctggggctttctttgattggtagtttttttttttcaattgttgattcaattttgaatgtgttattgttccgttcaggttttcactttcttcctggatcaatcttgggagattgtatgtttccacgaatttatccatttcctgtagattttctaatttctgtgcatcaagttgttcataatagtctctgaggatcttttgtatttctgtggtatcaattgtaatgtcatctttgtcacttctgattttgcttatttagatcttctgggtttttttcattattagtctagctagagatctatgaattttgtttattcttttgaagatctaggtcttggtttcattgatcttttgcatggatttttgcatttcaatttcatttagttgttctctaattttaattatttatttctctgttatctttggggttggttcttttttttttttaagttcctctaagtatggtgttggattgttaacttgaggtctttctaacttcttgatgaaggtgtttagcactataaactatctccttttaacactgttttagctgcatcccaaagattttggtaagttgtgtctatattttcattaatttcaaagaattttttttatttctgccttaattattttgttcatgcaagagttactgaggagcaagttgtttaatttctctgtatttgtatagttttgagagatcttcttggtattgatttccatttttattatggtgtggtccaagagtgtgcacagtatgatatcaacttttttgaatttattgagacttccttaatgattgagcatatggttgatattagaatatgttccatgtgcagatgagaagaatatatattctgttgcagttgggtatagtattctttaaatgtctattgggtccaattggctgagtgtcatgtttaaatccataatttttttgttcatttctgcctcaatgatatgtcagtaaagtctgtcagtggagtgttgaagttttccattattattgtgtgggtcttcttgtagttgttttatgaatctggatgctccaatgttgggtacatatatgtttatgatagttaaatcttcttgttaaatcaaaacctttcattatgtaatgtccttctttctgctttttgtttgttgatgttttaaagtttgttttatctgatataagaatagtgagtagtgctcttttttccttcctgtttgcacggtagatcctgctacttttagcctgtggatgtcattacgtatgagatggatctctaaatgatggcagagagtttgatcttgtctttttatccagttggccactctatgccttttaagtggggtgtttagactgtttacattcagggttattattgatatctgagattttgaccctgtcatcatattgttagctggttgttttgtagaattgattgtgtagtttctttatagtgtctgtgggctatgtgcttaagtgtgtttttgtggtagcaggtatcattcttttgtttccatgtatagcactctgttaaggacctcttgtaaggttggtctagtggtaataaattccctcagtatttgcttgtctgagaaggattttatttctcttttgcttttgaagcttagtttggcagaatatgaaactgttggtatgaaatttctttttttttttttaaggatactggaaacaggctccctatgtcttctgccttgtaagaattctgctgagaagtccactgctagcttgatgggattccctttgtaaatgaacggatccttctctctagctacctttatgatgttctcttttgcatttaccttgatgattctggtaactatgttccttggggattgtcatcttgtatagtattttgcaggggttcttggtatttcttgaatttgcatgccagcctgtctagcaagattggagaaatgttcatggattaataataatgtcaatgacttgtaggtttggtctctttatataaccatatatttctcagatgttttgttcattttttaaaaattattttttaaaaaatttttatctgagtttactcaaataactggtcttcaagctctgagattctttctgtggcttggtctattctgctgttaatgcttcttattgtattatgaaattctcatagtgaattttttcaattccagaagttcagtttggttcttttttgaaatggctattttgtcttttagctcttggatcattttactggattccgtgaatttctggattgggtttgaatgttcttcttgatctcaatgagcttccttgccatccacaatgaattctatgtgtgtcattttagtcatttcaaactgattggataccattgcttatgagctagggtgcttatttggagggaaaggaacactctgactttttgaattctcaggtttcttgcatggattctttctcatttgagaggactggtgtttctttagctgtagcataagttgagtataatcaattggctttgtttctgggcgctttcagggtgccaatgctctgtacaggatctgtacttaaagctggatttttgccccttctctaggagctatttggggccaggaactgtccctgacatttgacaaatctatgcagggttcccagcttcctccctcttcagccttggggtctgcctcacctctcttttgactcttggtattttctctttgaaaatctgttcaaaatatgttagcttacccaatttttggtctttcttggtgacagcagtgcttcctgactgtgtccagttggacgtcttgtccagaacccctggtgattatttttaaaatgaagctttgttgtagcactcttggccaatttaatataatgtccttttttccctttataagttagccttcatgtcttcagtctacacttagacattcaggtcctaaatattacctttgcatattcagtatacaccagctccattcatagctgaacacttcaccaggttcctaattcctgaaagaacagaagccatatctgtatcccaggaggctggggcgacaagatggtggatctccccttattttcttttcatacattttttcaccaaaatttgacttgtatttgcagctatctgctatcaaacactagaagttattctttctcactgtatttttgtagctatcaaccaacttttcttcatccctctctcccctctacttttctcaacctctgttaaccactattctactttttagctccatggcataagtattttttagttcccacatatgaattataacatacaatatttttctttttgtgcctggcttatttaacataatatcctccagttccatctatgttgctgcagaatgacaggatttcattctttttatggctgaatattccattgtgcgtatataacacattatccatttatctgttggtggacatttagcttgattccatatcttggctatggtgaatagtgttgcaacaaatataggagtacagatacctctgcaatatatttatttactttcttttggacatatacccagcagtgggatttctggatcatatggtagttctactgtttataaattttttgtactggctgtgctaattctaattcccaccgtaagtatatgaatgttcccctttctctgcatctttaccagcatctgttattttgtgtctttttgataatagccattttaactgaggtgagttaataattcattgtagttttgatttgcagttccttgatgattagcaatgttgaacattttttttttcatatacctattggccatttgtatgtcttcttttgagaaatgtctattcagatcttttgcccattaaaaaaaaatcagattgttattaatattatttttgctattgatttccttatgtattttggttgttaatcccttggcacatgtataatttgcacatattttctcctattttgtaggttatgcattcatttgtttattgtttttgttttttgctatgcaaaactttttagtgtgatgtaatcctatttgtctctgagtcttcttatccttatcttagaaatgaatctaatactatttgtctgtctgtgttgttggctgtgcttttgaggtcttactcaaaaaatatttgctaagattgttatcctaaagtatttcctcattgttttcccctagtagtttcatagttttggttcttatattaagtttttaatccatttttattttatttttgtatgggctaagagataggggtctaattttattgttctgcatatgggtgtccagtttttcccacaccaatcattgaagagactatcctttccccagtgtatgttcttgatgcctctgtcaaaaatgagttggctataaatgcctgggtttatttctgggttctctatttttttccattggtctatgtatctgtttttgtgccagtaccatgtaactctggttactatagctttatagtacattttcaaatcaggcagtgtaatgcctccagctttgttctttttgctcaagactgctttgggtattccaggagaatgacatttttgaagaatactagccaattattttatgcaatatccctcaatttagaatttttagatgcttcttcatgagtaaatttagatgatgcatatttggccagaatagcatactgcatccttctcagtgcattgtatcaggaggtatgtgatatcaatttctcccagttgtggtgataccagctttgatcacttggttaaggggaaatctgtcaggtttctgaaaagagttcctgttttcctttgtatttaataagtatcttgtggggagatattttgagactgtgtaagtatcctgttccacatgataatctccttcactaagtttagcacctgttggtacttacctacaacagttattaccgtggtgtttgccaaatggtgattttctactctcatcacttcttatacatttatttctccaaatactgctgtgagaaagagtttaccatgctctcctatttatatatttacttatttataacattgtggtctcatggattcttactttattctatgggttataatccattactgttgttatttatgttgttgatcaaactgttttaagatttgcccattgggagactgttccatttgactcttgactttttttttttacatgcccttgttatttattgtgctattccttattttcttttataagttgatcttatacttttctttgtctggaattagccatttctccaaggaaatctgatgacttttactggaggaaggtacttagaaatcatgatctggaccgtgttctattttatcttctccctatgagttaggcacaattagcaatcctacatttttaatgaaataactgagaactcaagaagttaaataatacatctgatgccacacaactgaaggtgatagaactactatttgaacccagtctaaagtttggtctccagtgtccatacttaaatttaatttctctctgggattggaaagcttttccagtgtctctgagtcttcttttccttgtcttagcaatgagtctagtactatttgcctctcagtgttgttgtgatggctaaatgaaaggacacatcggaaattgtctatacattatttgttccatagtggatactcaaatatacgttgaatttgagctatattcactcagtattcataaacacccactttgttcgcagcactgaggtagaaaatatgcaggtacatgcatatttcctggtaagagctcatatttcctggcaataatttctaatgtcactccttcctgtgcatccaatataggataccagaatcctttccaagatagaatttaggcagacactactgaacaaatgaaacgtatttgctgccctagacatgagtgatgaagggttgggagaacaggcgtgactctaccaaaaacaggcagataatccaggctcacatttcaaaacaccttgcaacttaagtttctaaccattttctaacagtccttgaaattatgctaatataaggacttccaggcaacatagaagactgggtgtacatgctaatacacaaatgacatagaggatcagcatcccaacttcttggaatatgccagacagtaataaatgtaacagccacaaaattccagccttgcttaatttggggaaatgagaatcagtttgttcttcccctgctggcactgaacagtggtttgcaggatcactgcgtgggaaagatctgacagtagagatctgagaggctgtctgtgtgaaggctgaatttcatgaactatctcattgttgggatggttccctttcagcctcgtggtaagtacaacactcaggtcactgtaagcgcagggcaggcaagcttaagccacaatgagtgaaaatatgtgtgtattgggttgggggaagggattttagtctggattatctgaagctcagactttaagctgagagcctgggctgccaagcaggtatatgtaaaggacagctcaaagctgaggtttaaaactagtatgctccaaccaggctgtgaaagtaactaaagtagctgagtgcctcagatcacctaatgtttatttttgttttgttttattttttgtttttccatttttgttgttgtttgtttgttgttttttctgagacagagtctggctttgttgtctaggctggagtggagtggcacgatctcggctcactgcaacctccgcctcccggattcaagcgattctcctgcctcaacctcctgagtagctgagactacaagcgtgtgccaccacgcttggctaatttttgtatttttagtagaaacggggtttcaccaagttagccaggctgttctcgaactcctgacctcagggaatccacccaccttggcctcccaaagtgctgggattacaggcgtgagccaccacccccagccgccctaatgttttacaagtttgagacataaacctgtggcatgcttttttttgggaacatgattcagaaatcactttttcctatcaaaaagcagaaaaatgagccatgatgattggaatccttcctgatcttataggtagactgggaaagcatagctgggaagagcacagacagggagatcagaagaacctcggactgccacaaaatgtgtaatgccaggtaacctaagccagccagtcaatttatctggggatcacttcttcacttgtacagcgaacaagatgaattagataattgtataattccttggagctctgaaattctactgcacaaatagatgcctcgtgatcgctgttgagatgaggtcttccagagcctgtgatcccagatgtgattgatcatcttgccagagctttagccaccttctcacctgttagacaattcctgcccctgtgtctctactgtatcgcctttcacagctcatatgctgcacctatgcagtcttcttcagggtaagctgtgtgaagtttaagtttcttataactattaaacttcatcttgcaaaggattcttcctttgaagaccaggttgcaaagtaaataaaaatgaaactacacttgataaagcagggatgggaagtctgtaaccttatccttattgtgggatatttgaattgtctctattttttgctatttgtcttcaagttgtcctaagaaggtgggatcaatatcccccatcctattggttcagagtcaagactaatgatgccacacatgcatgaagagtgtatggaaacatttattatttacatcatgaggctttctagggagagcagaggaaacacccaagcttttctattagatttgagtgaggaaggcacaagtggctttggtttctactgtgtgtgggtgtgggctggcattagggctcccgtgtacaggctcaagtttacgtggtttgacttctatgctagtgccaaggaaaggagggcctgggatttttttttaattggcttgctcatgtgtgaggggaaaagagaagtgggagaaaaggggtctgaaagctgtcagcagccagataatggagtcagatgatcttacatattagaaaattccaaggaaaccactaaaaacctattagaactaatacatgagttagcaagattgcaagatacaagatcaatatgtgaaaaatcaattttctttctatacatttacaaagaactatccaaaaatgaaattaagagaataatttcattcacaatagtatataaatatattaaatatataggaataaatttaatataatgtgtaaaacttacatggtgaaaactcaaaacattaaaaaattaaagaagagcaaaataatagaaagtccatattcatgaattaaaagtcttaatattatcaaaatgacaatatttctcaaatttatctagattcagcacaattcctatcaaaatctcagctggcttttttttttttgcagaaattgaccagctaattttaaaattcatattgaaaagcaagggatccagaataacaaaaataatcttgaaaaagaagacaaagtaggatgacttgctggtatggtttggttctgtgtccccacacaggtctcctcttaaattgtaatcttgtaattcccatatgttatgggagggacccagtgggagatgatttgaatcatggggatagtttcgcccatactgttctcgtggtagtgaataagtctcacgagatctgatggttttatcaggggtttctgcttttgcatcttcctcattttctcctgctgccactatgtaagaagtgcctttcatctcctgccatgattctgaggcctccccagccatgtgcaactgtaagtccaattaaacctctttttcttcccagtatcgggtatgtctttatcagcagtgtgaaaacggactaatacactcacacttcccaatttcaaaacttcaaaaacagttatgaagaaagtatagtactagtatgaggataaatgtatagatcaatgtaataaagttaaaaattcagaaataaagccttacatttaaggtcaattaatttttgacagtggtgccaagacatttcaatgggaaaagaacaaccttttcgacaaatgatgatgaggcaacagaatatgcctgtactcataaataaagtttcaccccttccttatacaatatacaaaaattaactcaaaatggatcatagactaaatgtaacagctaaaatgataaaatttttagaagaaaacataggagtaagtcttcatgaccttgggctaaacttcttagcaatgataccaaaagcaaagcaaccaaagaaaaaatagtgacccttagaatcaccattaaataggaagatagtaccccttgtattatgggccttaatttctataggccttgtttttttaatctgtattgggacatattaactattttaaccagagatggattattctattttaggttcgtggtattccatttttttaagctgattttcaatgtcaaagatttaattttatttcaatttattactcattgggttaggtcatatctactacgtgatatatgttaaggcaacaggtgctaaggccatggagaatttagagaaggaaagtgtaccagtagtcaaggtgaggcatacctgtttgccctctactttgcatttggtaagcaccctaagagtatggtaactctttattacatatagatcaatgtaataaatttatgtttaaactcttaggggagttaccacatgcaaaatagaggacagtttaaatttggtgagatccccaaacataactgtaatttgagccacagaattagttaagaccatgaaggtttgccaattcttttcagcttagcagattttagagttagtttcaaaccctgtgttttaaaatacaaaagctaattggcatcctttttacttttcaatttttattatatatttttagtacattttagatttctaattggatcaaattatggatctctgttttagtttcccccaccactcacttttatttacttgcttttaaatttgacggttgctggatacactttaaaggggttgtgtcttctttgttcagatgtatatatacacattttcccttcagagagtaccaactcattatcatcaagctgagggacctctcccatggcagttgttttattggatagggtactggcttaagtagagtttgaattagccctttaacatgttgataagccacatcactcaatgaacaccgtgtctttgttggtcaattttatatataatagttgtctgttagtgtcctctggccctttaagtggggcagggataatgcattcaagtctacttctcataaaggtctgtgctttggcagccatggatactctttccctttaactttgaggatcaggttttcttttggtggcagagggataggcaggtcaggtatgtgtgaatgaactgttcctaggagtgtagacctcagtatgccacagggtgactgtttgtgacacaatggcacccaaagggtccatgtattacatagcttatcagtatcagtcttttctgtcattattgaataggattctttcctggttgagacacagaacaaatagtattagggtaagaattgtttccctgaacctatcataaaccacagcttatgctagaatagagatttaatctgaggcacaaagataggcccaggctgagacatatgacctagggcaactttaagtagcaccccaatcccatactctcgtccctaaatgccaatattgaaacttcaacttaggttgattaagtctatagaagaggcacagtaggactcagcaaatgcagctcaaaatacatgctaacctgcagccttccaaagtgtctacttgcctgccagaagcagagcctgttagcccaccaaaagcaaaggacaaaagctccccaggtgatagtggccatcacctagatcatcctcatcaaagggccagttgtcaggtggttgcttagcagagaagtggaatcaatcaccccctcccaaaattggttcagatgtcaagacggacaatgccacaaaagcaccaggaaggtgtgaaaatattcattacatcatgaggctttctggagagagcagggcaggcatccaagtcagtttgtttggcttgagtgaaggaaggagcaaaagcctttggttttttattgtgcttagggagtagtgttggggagagagttcccacatgtgtgccaatttttgcattatttgaacttccctccttgtgccaagcgagggagcacactggctttcttaccagcctgcccagatgtgaggctgggggaaaagtgaaggagtgcagcctgaaaactgtcaatggtcaaatatcaaaactggaatcacatactttattacgccatttaaagtaatgccattgtagcatgctggtgcacacgtcttcatgggatccatgaagaaatgggcttcctggaaagctagaaatatgaagatagtgcttttgttcaagtacaattggtactgactactacctctacctgcacaagaacgaagaaagttcttgcctataaaactgctaataaatggatgtgcataaattattgtaatatattcttctggcatgattatgcaagctttgagtgtaaagggcagttgtattgaaaaaaaatgagctgtctattaccttgcaaagacatgtcccaacctactaaacatgcctttcagggactctgagaactaagaaataccatggtatgctgtgatgtgctgtttctgcttctgttctgtgtggccacttcacttatgggacttaatctaatcctaaaatgtgggagtatgtggaaatgtttgttcttgtaactccatagttcattgaaattaagtgtaaagcatttctgaattagctaaatgttcttcagctaaatgtctagaaaataaatttaaaggccagtgtatctatcaaaaaaaggttttggaaactttcattagttaaatatgattatttggggcaaattgaacctcgaatttagtggtgtaatttcactaacttaagtatttaagccattaaaaaataatgaatgtatattagaaagtatggtagattagacactctgaatacacgtctttttttctcttttttttgagacagggtttcactctgtcacccgggctggagtacagtggcatgatcttggtttactgcaacctctgcctctcaggctcaagcaatcctcccacctcagcctcctgagtacttgggactacaggcttgtaccaccacacccagcaaatttttgtattttttgtagagacatagtttttcctgttgcccaggctggtcttgaactcctggactcaagcaatctgccgcctcggcctcccaaagtgttgggatttcagccgtgaggcaccatgcccagcccccatcctcttaaacagatcttatttctagataaataattattgttagtgcatttctgggtcagctagaaataggagctatcaccaaacaggagaaaacttaagaaaaatgccaagctgaaatcagagaaagaagtacgtgttttccccaaattcagacattgaaatatagagacaaagccttggacccaccatacactgggggatatgaataaaaaactcctttgttagatctggatccttgaagtttaatcaagtggtttcttatttgtagcacagatccttcctaaaagaaagtttcataagcttaggctgtcaagatttccacaggttgataaaaggcaaatatgagctcatgatcagaaattagcaaacacttaaggaaatctcacataagagttagcaaaagaaacagatttgaatgccaaaatggtatcagatattaaaattatcacaatcagaacataaagcaaatttgtatgaaatgattaaacaaataaaggtgggttaaaacagagaaagcaataagttttttttaaaattattttattattattatactttaagttttagggtacatgtgcacaatgtgcaggtttgttacatatgtatacatgtgccatgttggtgtgctgcacccattaactcgtcatttagcattaggtatatctcctaatgctatccctccccactacccccaccccacaacagtccccagagtgtgatgttccccttcttgtgtccatgtgttctcactgttcaattcccacctatgagtgagaacatgcagtgtttttttttgtccttgtgatagtttgctgagaatgatggtttccagtttcatccatgtccctacaaaggacacgaactcttcattttttatggctgcatagtattctatggtgtatatgtgccacattttcttaatccagtctatcgttgttggacatttgggttggttccaagtctttgctattgcgaatagtgccacaataaacatacgtgtgcatgtgtctttatagcagcatgatttataatcctttgggtatatacccagtaatgggatggctgggtcaaatgatatttctagtcctttttaacaagtaaccagtttgaaaaatatccaagtaaaactttcagtataaaaatattattgtatatactttaaaacccacagttaaatagactatcattgaagagagaatattagtaaactagtaagttgctctaaagatattaatatatacagaatgcaacactgaaataaccagaaatggaaagtctaagaggttagatgatatagaggcttgaatgagaaagtttttcattcaacaaatcaaagttccaggaagagagaataggaaaaagataggagagccatacttgaacaggtggcagctgagaattcttcaaaatgatgaaaaccatgaaaatatatacgatacatatggcaaagcatgcagataaacttaaaagccccacctaaccaaaaatattaaaactgcagagcaccaaaaacaaagagaagattttatgagtagccagaagacaaaagttacctataaagaaatgacaattagaaggcacaaggcagatttcttggcatcaaaatggaagcagggaagcagtggaattatattttcagagtgctgagagaaaaataaatatcagcttggaattgtgttagaagtaaatctatctctcaagaaggagtgcaaaataagaaatattggtatggacaaaatggaaagaatttactaactgtatattcaactaaaagaacttctaaagcaggtacatgagaaaaggtataaattatcctggaagaaaagtgtgaaatgatttaaaggaatcatgagaaaaaaatggcaaacatataagtaaatctaaaccaacactttctttattaaaacataatttgtagattttcacaaaaggacagaaggaaatcactgtcaaatgtaacatctaagtcaggaggaagtgatcagagtttaaatgttcaggcaaaggatttaagatattaatataagattttttagatcagcaatttgtgatatattttcacgaatcaccgccaaaaaaaagagtgtttaaatcccaacctagtgaagcagagaaatatatatatataaacatatatatatatatatatgtaatcaagaaaagagaaaaagaagcttagaagtggaacaaatacaaattccgaagtaatatgctagaaacatgtctaaagggatcaaccatcacaatcactaaatggactgaactcacaagtgaactaccgacattgtcctattagatgaaaaaataaataaacccaactatatatcctttaaaatatatgtatgaaaatataaggacacacatgtttgaagatataccaggcaatggcaaccaaaacaaaatgagaatatctatctatatatctgtctatctacctacctacctacctatccatctatccatttatctatcatctatctatctatctatctatctatctatctatctatctatctatcatctctatctgtatctctgtcgaatagaatatatctctcatatatagaattcaagacaaaaagtattactggggacgaagaggacctcatgtaatgatagacctttcgattcaccaaaaagattttttaaaatctaagtttgtatgtacctgttaaaatattatatttcatcatacctaagataccgacatttgtaagacgtgctgttattttatctaccactgtcaacagtaaaaaactcctgcaactaaactatgaaataatggtttcatattatgtcaattataagagatcttcattttgagatgttaaatatgaaaaaaactgtcttagaattaatgaagtatgatagcttcacaccacttaaagcaactatttatgtaagagaaaaatatataaaaatctacataacagtaaaagatttcaaaatatttctttcaattgtgatagctcaaacagaacaaaaaaagatataagagatgaataacaagctgattttaatggacatatgtagaactgtgcacagagaacacacattcttaagcatatatggaacattttttaatttgaccacatcttaagctataaaagcaaatgttaacaaatttcaaaaactaagtatcacatgttctctgactacaataaaattttaatttagaaatttatactaaaaagttaactagaaaaaccccatctgttggccaggtgtggtggtttacatgtgtaatcccagcactttgggaggctgagaagggtggattgctggaggaaaggagttcgagaccagcctgggcaacgtggtgaaaccccatctctaccaaaaatacaaaaattagccagtctcataacccagcctcaaaaaaaatttttttttgaaattgaaacacatggctcataaaaaataatggaaattaaaaatccctagagttgaacatttatgaaaataccgtatattgaaaaagtggcatgcattcatttataatgaaaatctgtcaaggaacaaggagttgaatggaactttttagctaaataaagagtatctacctaaaacaaacaaaacctatagcatactttgttcttaatggtaaaaagttagaagcatttcttgtaaagtcaaaagtatattcaaagaaaagtaaattttcccttccatccagactgtcctgcagagacaaaaacatattcatatatgtttggcagggagaaggacataaagagaaagattttgttttggtttggcttgttttaagatttttttaaatgtttgatatacggtgacagctttcccacaaaactgtactaattgaaacttctaccaacagagtgtgagagcattcatttcactacatgatcacaaacattacgtactaccattttaaaaaatagcaaaatgcctctttaaaaaatttatatgatgccttgtgggactcaacttgctcaatgagtttattgactatttttatttttatgttataaacagctcttcttatggagctgttaataatgtttgcttttatttgtaagaaatgtttactaaagtaggtaataatccttcagctgtcatagatgataaaaagcatactttttttaagtttgtaatttgggttttacttttttatggtgttttaccatggcagaggaaaactttttacatggttagacctaacaatattttcttgtattttttcttcctttgcttttattgtatatccctagagattggagagtctctaatcgtttgtggtgatcgttgtctaatagttacttttcttgtgttggagtatctggttaggattgcaaattcatttagtcctaatatttattaaacagtgcttcatttcctcactgatagaaaatatcaactttatcatagtatatattattttgtgatagaatcttgttcttttccttctattttgtaacactaatctttcagtttttttttttacaagttccatgttgtttaactattgcagcattatttctgagatcatgataattcttattactcaccctgattattcttttttcttttttgctcctttttattggatactgttttaaaaattacaaacattatccaccctcttctatttcaagatgacgtcaactattctttttaaatgtattaactaagaggaatgcagaatcattttctaaagttaaaaataaaaacttgtccaatctctgatatatttttttaatagtgtttgacccataaaattagggacatctgaagtaggattctaaagtaagaaatatacctgtttgtttggaaaggtagaaaggaaatagttacattctcacgtaaccaaagttttaaaaaattatctagtgtcatttatctgacattatttctctaaagtgcctcatcaactccagccagacaaatctcttcattattcctgcttcaggccatgcacatttcaaattctcaggctttgctgagaatgttctttgccagggatattttttctctttctttctgtttattaaaatttgtttctttaaggccaaactctagctccttcatcatgaagcttcttttagtatatgttccacagagtttaaacattttagaactttttctaattataaaagcaagaaaataaactcatagaacatttgataaaaaatagagacatattttctataatattaactccctattatgaattatatatatttccttgcagtatttcatatgaatacatagttgtaactctagtgaacttacaatttcatgttctatgttagcatggtttcatgcttttctctgttgctccattctattcattattaccatttttttttttttttttttgagacggagtctcgctctgtcgcccaggctggagtgccgtggcgcgatctcggctcactgcaagctccacctcccgggttcatgccattctcctgcctcagcctccagagtagctgggactacaggcgcctgccaccacgcccggctaatttttttgtatttttagtagagacggggtttcaccgtgttaaccaggatagtctcaatctcctgaccttgtgatctgcccgcctcgacctcccaaagtgctgggattacaggcgtgagccaccgcgcccagccccattattaccattttaatgactatccaatggtccatagagtcaatacataattatttaaataatctttgctttactacctgtcccttatcataaaaagctctgcagagaaaatctttgttgtgtagctttcctttctttggggaattagttccttagaataaacatcaagaattggaatttaggggagagaagcgaaaagcattttcaggctcttgaaatgttttttcaggtggctttcattcaccagttttatgtatgagagttctagtactccagttgacttgattccctcagatataaatattttttcgttattatttaagaggaaaaaagcatgttaagcattttgccccaattctctgttattgtgtattagttagctctcatgtattaattttgtttccccaaagagactgtaaggtccttgcatgagactagagataatgacttatatttattctttataccccacaatatctccccaaaagtgtggcagacacagttgtcttcagtatttgcttcttaagtgattgaaaccttcacaaaattcctttttgttcctcaaactcaaggccaattatgatagaaaatttggcaagtagcatatttgtggagtctcagctccaaaaataaacccttacccaaacctcacttgtaggggttaaacttatgcttggaatcaagattaactgaaattttcaataaacatgtgtatattgagtttttcttgaatttcagactcattttatcctagttcttatccaattaattcacaaaacataagctatttaaccaccaccattttcagagattgctcataggaagaccaaagaacatagccctagtcctctaaaactggtgtcctaggatgctagaaagtcccttgcctccacaggaaagcaaaaggcaactataattgaagtaccctattgccatgtgttttcagctacacttgttccccactttatcctagttctagaacggtgccagggatatgataaacagtcaataaatatttgttgagtggttgaatgaatctgtgtgcataggttgaatgaatcaatcactctgcaaatatgtattgagctctcgcaagatgcaaagcccagtgtactggttactagaaaaacagataaagttgatggatcttatacgtggcagtgggctggatttaatgaccttgaggtttcatccagtgcatttttctacaactcatgtgcatttcttttgaaacttacacgtcacatccacaagccgaataaaactcctcaagctgcatttctaggatgatcccccgccacctctccctgagggcctgaaaagttgtatgctgctgatttctggtgcgggcaactcctgggcagggacaaggatggctccagatggatggatgcctttgtggagggctcccttttatccttagttgtaagccgcctgagcagttatattataaatgggtaatttaccgcctcatccccaaggcctcttctgtgggctctttcatggacactgttaccaaaagttaccaatatgcctggtgcctttgatatttgtgggcactgcagaccagagaaaaagagttgctgccttgtacagctgcacactggctttcacatgtcctgcaaatgggtacctgccagccatcttccccagatgtcatactgaccattgatttttttttttttctgcttgctattgcagttattaactacagtgaggcctgggcacttagctctccactttaattattcatccttatgaagaaaaatttcccccgtgtgctttattgtcctccagccccgacctgagctcacgcagactcttccttctttccctccccaaagtggcttgtgtgtcgaagggctttccactggggtgcttattccatttatgcctttagtatgcattttgtgttctgccaagggggtcaggagggcacatggagaagccagatggcttacctcttccctcaggaaacacgccgctatttagctgggcaccttcccaactcaaggcggggtgagattccactgttggagagagagttggttcaaatgccactgtccctgagatcacagctccaagttcctctaggctatgcacttttctacttctctgccacttgctggagttttctgccagaaacagccttttaggagatattagaaaggggggtgggaagggagggatgggaaaaagcaactcttgttatttatggtcctcgttcaggcacaagtttctgttattttaatccggctgaaataagaaaccataatccatggatgaaaagatggtggacaaactcagttaaatcttgagcaccctgaggatgtgtgtttttccctatttctggtttttgacgttccttccctgctgccatttcccaactttaacttttgaaaagccaagcagtttggctggccaggcccagggaacttatttgtatgcagcacaaatttcagaatctgttctcagcctgtgccgagtgaaaaatggcctgcattttcttgatagcccatgtggttgtaaagaataaatggctaatgaattacagatgaacattgacgcaaattaatcttcccgctgtccctgggttatatggcagccatttaaaagtttaatcaatacactaaagttgaaaacatgcaggcactgcagttgtttggatgtaataaacatcagagggaaccgggaggtttgcacccagtccatgtatcataatgacaggtatttatgtttaatggactaaatattttttattggaagggagcaaatgtcagcttaactttgtgagccccgcattcaactttcctttgaggttggtgaaagacggctgacgtgtcattggaaatgaaatgttaagggagaaaaaaagcacaacggagacaaagcgaggatgggagccgtttggagacgtggtgcagcgcttacattctgcagcaattcattaacgaaaacgtaaactctgatatttctaatgttgctgtaaaatggtttactaggaacaactttaatggttattagtgaaaacaagtacccagatctgccagatatccttttcagtgcaggcttttgtttgaaaactctttaccaggtcatatttgctggagatttataattagtctttttccttaatgtgagaagtggaggagaaacagcgtgatggctctcagctcttgtattccatagatctttccttttgaacggtgtccaatgacttcgaataaccatgtgttctcttttggaatacttatatcttaattacttttcaagtcaatattttgtacctctgccgtgagtctggaaggaccagggtagctaaaagagaaaggaaattgccagtggcagtgccatctcgctggacaaaaacaggctgagacacaggagagcaatggcttcacttgaacagaaaaatacagacttagttcagcttttcattttttttcctccacatataaaataaactaaatatgtcagtggagcatggggtcttagaaaataacacacactttataaaaataattagaaacgttttagacaaaggatatcgtgtttttaatgtcccttctgcaaccaattgtctcaggtcctcttcagtgtctgagggcacattcaatggcagggcttggaagaaaattattcagtagatagcaagatgaggctgaaggatgagaaaaagggacaggggttgtgatacttatccagtgttcagatcttgcaaaagatatgaattgcacctttttatgtgttaaataattttgttaaaatcacaagaatttgtgtttctaatgggcctaagtttcataggtaatcagtattatgtgatactaaattagtaaaccaaactgatgggttcattggtccttcatcatcccttaagcaaaatggggagaaactttctgttatgaaaaccgaagcatggctcactgttaaccatgatgacatctcacccactactgctcctgaagtcctaaactctatttttcttcctacctctttctaccctcttagaggattgagtcctttacctgtttgttcactttgtgtttccgccgtgtgaatataagctccacagtagggggtaggaggcaagaacctgattttcttctttgcttctagtgtcctggggcctggcctataataggttcttgtaaatggcaggtaagtgaatggcggactacatttcttatggtctttagtaatttataactccggctattttttttgttagtcagtatgatttctagtcactgtgttagttgttttacatataatacaatacttgatcttagttgttaactctagaagataagagttattatcttcattttatagaggcaaaaactgatgtcaagagaattgaagctaattatttgtggttactgttagtatgtagcaattccagaatttgaatcctgacctgtttgtctctgtatcagctatacagtactccccaaattcctgtcactcatcttgtccctggggattaaaatctcattaagtgaccacaacatttaattctagactataaccagccagctccccaactggctgataatgaacagaagtattagattcacaatttgcaacctaaacctggtgtcctgagtcctacctatagaaagcaatctttgactgtacaaaagtagcacattggctatttgatgatgggtgatatgtcactcaaatatgtgtgttctgtggtctagggaaatacaaggaactctctcaaatcatgagaaaagtgttcagcaacagaaatctaacaaatagtgactgaaatgcataggcattaatttcttcactcagaagtgagaatggaggtaggcagcccaggacagtgatagtggctgaaagagcagatcagtaggcacccaggtcctttctgtctttctgtcctactaccttttcagcatgtgcattttagcctcatggtctcaaaatggttgctactgctcctggcatcatttcctcacccaaagcaagatgaagaaggatgtctttcccttatgaggcattcgcttttcatttgtggatagacagcttcctaaagatgtctgtctctttctcattacccagatcatgtcattgggaggctggaaagtcaaatgtttcagttttcatgctgttatagtagaggaaggcaggataaaagggagccaatgcatagtgtctcctatgtaagataaatcgcattttttgtatacctaataaagacttgaaactttgctagatgccatatgcacatcaacttatatcatgtttacaaccaccttgttacagaagagtatttattcccattacactaagaagaggtgatctcattgttcaattcccacctatgagtgagaatatgcggtgtttgaaggggaatatcacactctggggactgttgtggggtggggggaggggggagggatagattgggagatatacctaatgctagatgacgagttagtgggtgcagcgcaccagcatggcacatgtatacatatgtaacctgcacaatgtgcacgtgtaccctaaaacgtaaagtataataaaataaataaataaataaataaataaataaataaataaataaataaaaatgccctaaattatcaggtctgacaaaaaaaaaaaaaaaaaaagaagaggtggagctgggatttagagctacatttgtctgtttctatcataggtcttctctctaatgccatgtttctttggccaccattttgatgtcatagtgaaggatgatttcatagtgaaggccattcccagttgttccagctcatggtgaatgtgctgtcttctgagggcacttaacagttgggtctgcctctttgataattaagtatgcactaccatgtgccagcttccatttttgtgtattctgtacagagtgtttaagaaggtgggtcagagactcactgtctagatccagatcttggctctataagttactatcagtgtaatctcatgcaaattacataacctctctgcagattgaacttttggagaccagggacatgattttttttcccctcttgatatctcctaaaacactgacaagattctatttcacattagagccactgagtaaaaactcattctagaatcactttgaatctttgtttcattgatttaacatctttttgccttagcttctgaatcctaaaatggggacaagaatacatctacttcatagggttgttgtaatcgttgaatgagataatgtacctacttaaagtttttagaacagtgtgtgatgcatagaaaaagctcagtgttagctataattattataatcattcatggattgccagtattcaaactctaaaactccatgggatataatataatctgtaatgtatccaaaagcaatttttcttaggccatctcaggtacactattataaagaataaccatatccttctggtgaagccatattgagcatctcctgcaatccagggagtgtggtatatgttggagatacaaaaatgcataaaacacagtgagaaacatgtggtaatgaacaccatgagcaatattcactctcgataataaccaaatgcttaaaaagtaaagcaactcttggatataatatttccacttattaaactagcaaagatgtttaaataggcatgcctggtgctatggagtggattgggtgcatattaatatgtttttgaaaagcattttggccctgtgcattgaggctagatgcattcacttaggaatctattccaagacaagaatccaagatgcataaacacaggatctttatacactaaaatattcactatagtaatgtttgtaacatcaaaacacacaaaaagtcattatccaactagataagaaagctaaataaattatggcacattcacagaacacaatgttatatagtattcaagtgatggttacatcagatttaatacgataggcaaatatttaagtaataaaataaatgaagatggatatatatgaatgcatccatacaacatatggacagaaaaaaggccagaaggcaaaacatccaaatactaactgtggttagttctggacagtggaattatatatgatttttattttttaaatttacacttaatttttttacaatgaacatttaaatataataagaaaacaattaaaataactccccaaacaacaatatagtctttatgaaaatagtttcagagagaaggggagtgataataacaaaaagagtttatgtgagttagttaagaattgtattcagctacaactagccccaaataccagtagctttaagaaaatactgtcctataacatgaatttcagatgtaggcagtccatagctgttatgatatcactaggaacacaggcttctttgattttggttctatcttccaacagactggctcccatcctcaagtttgatttatggtcaccatattattgctgttgcactagctcttctttccaagttccaagtagcaggaaggaagaaaaggcaaggtgagcactgctatgctcaacagcataggggctctgtgtataagatgaaagaggaatatagatactgggtagccggccttactttcagattttaataataactctgccattcaacagcaggttgacgttaagaaaatctcgcatgtcaatgacaccaaggaggcctccagaaccttctgaatacagtgccgtatgcaaccactgtcatcacctgtgcttggtgatgaatctcatttgccattccaagcctctgttacctcctgtgcttttgtttcctcctctttaaaataggcatattgaaaattcactgccttttatgattgtggtgaggataatatgattttatagttgtgaaggtcttttggaaaggcttagtatgctatgcaaatgtaatttttacaagactcatggcagccaatgggaattaagggctcactaaatgctattaatagtcactgctgaactccttatgtgcagaatttcatttaatttggggaatgagacattatgagtgtccccattttacaggtacagatattgagagacaaagaaatttgcacccaagttatctgcctcttgattccatgacatttgttctcaatcttaagtgtgcttaagaatcatagtaagcctgttaaaaatgtagatgtctaggatcagaaattagattctgctgcaggtggcctgcaaactacaattaatggctcagttctacctactctaaactcttaattatccagcaatgtggcaaagaacatgttcctcagacagagctcttcgggctcctgaattctactctgacttttccttgatcttctctggtagggagactatagctcttttgggtagaaaatgcccttttggcaagaaaaacttgccagttatttgggaggctttgtcttcttacatggaaaaaggtcactaatttctgaagctacctcctgtacagtagtatgagaatcctcagaggtaagaagacttgggccaataggtttgactttgttggttggattttcattattttccaaagagaaagtctttgaggccaagcataagggctgatttgccaatgggacttagtttccagtaagatcaagagtgtctaccacacacctgacttttgaactttcctcttagcccactaatagcagaggtgcaatgaggagatcttcatttggcaatggataggctcccaaaacagaaagcatggacatgccatttaaaggtcccaggagattgatttccaactggaatgcaggaagagtctaagagtaactgaaatttggaaacactgctagttatttttaagactactctttcttgaaatggatcagaaccaatagaacaaaccacaggttgtgatagatttatgcactgaggaatataggaagagaaagtaaaaactatgggcaaggattttcataaactgcatcataaattgatttggtgggccccaaggagaacataaacactatgcccaaggactcagggatttgacttttgtttagatccattttataggcaatctgtaaaaggaaaaaagggcaaaaataatattagttatctcataaagttgtttaaaaatcaagtgatgagaataatctatttaaaatacttatcacagtgcctacacataggaagctcgataaagttagctatgatgatgactgtaatgacgaggaggagcaggaggaggaaagggagaaagagaacgagagaggcaagaaatctgctaaggttttgctccatgaaatgtctttcagttgaaaattctcattgaaacagagaagctttgtctttataactagaagatgcagtttgaaaattgtatcatggaatgaaacacaaaatgtttttcattccatgaaagaattccataaaagagctagaccgtactccacgtggtgttctgcacatagaaggtgatcaaataaataactgattctgtgaagggctaaaggagattttcagaatgtgccatgcttctggggacaattggctttctgctatggtctcaatgctgatgtagaagataattctatgaaaagatcctcagaactgagaacttctgttttttccatgttaatgtttagatagccagaggacttatcattctaggtttgggggcagatattttgctatgcctttcctgttactgttagaaagaaaatccccacccctaccccgccactgtcacagtaataaagcactgctcaatgtgtctttagcacttcctgtccttgggaatctgcctactgcttctctaatatgggagagaccagcccctgtgctgaagcagtcagggactgtaattaccttaatacccagtaatggatcgttaggatcatgccacacagtccctatggtacaagagactcggaaattcaagatgggaagatgagaatatgtgaattgaatgacatgggtgagagtaaatttcccatcttttttctagtggaggaaatgcattaagtcttttgatactaaatatgatgttagctatagtttttgtttgtagataacttttatcagtttgaggagcttccccttttttcctgtgttgctgagagttttatcgtaaatttatgagtgctgaattttgtcatttttttctgcatcaattgaaatgattttatttttttaaattggttgatataaatatatcagttatatttatttttgaatattgaaccaaccttgcatctctaggataaagtgtacttggtcatgatgtattctactttttatatattgctgaatcttatttgctatgtgtattatggatttttgcatgcacattcatgaggaatattgtccagtacttttccttccttttcttgtaatgtatttgcctgtttttggtatcagtgtaatgctggtttcatggcaagtattcctaccccttcaattttctggaaaagtgtgtgtagaattgctatcattctttattaagtcattggttaaatttgtcattaaaaccatttgggcctggagttatcttcatgggccaatagtgaactctgcattcaatttctttaatagacatacaggccttcaggttattcacttcttctttagtcctaagctctttttttgaaaagatacattacacctccttcaaacctctactttaagttctggggtacatgtgcagaacatggaggtttgttacataggtatacgcgtgccatggtgttttgctgcacccatcaacccgtcacctacattaggtatttctcctaatgctatccctcccctactcccataccccccgacaggccctggtgtgtgatgttcccctccctgtgtccatgtgttctcattattcaacttccacttatgagtgagaacatgcacaaacctctacttttaatcattgtggccatcacataaccaaagtgttaattcacggcttgactatgaattcttctcataaccttctgggccttctgtttggtaaacagagaaagttagttcctttatacatttatttattcattcattcagcaaagattggaaccatattttgaattgtaggacatgcaatacaggttgtggtttcaaagatgagtcagacagtatccttgggttcaagtaaatttcttttaagagggagtaatagcaatcaaatgcttgactgtgctgcagtgggatatgtgtagtggttgtgtgatgggtagtgcacagaaagagaaaacaaggaaccattaattctgccaaggggaaatcagagaagtcttctaagaagaaatggcattttatttgggccttgaatgataaggagagttttatttggcaaagaggagtcttgtcatgtgaatcatcatgggaggtttggaggaacaagccatttcagcttttcctagggttagaacctttactttaggaatgcattgttttcttcttttgattgggaaaaccaaaatctgaatggtaaatttaaaagttacattgctttagttatcacagttcttctaattgtgtgtttctcagatgaatatgacatgcctcttacgatcttgctacagagtggattttatgttaaattatggcttcctggtgattctcagagttttatatcccatttttatttaaattattttcatagttgtaataacaaataaatttcttattcaaagaagatgcagcctttgaaatggatcttaatttgaatgttgacattccagtaacaaaacaaaaataaccacttgtagatggagagcgagagcgagagtgagagagagcgagagagagaatgaatcacaaacacctgtaaagtgtaactattagtttcaaataggatattattgaatctgtcctaaaaccagttgattgtgattattctaaattttaccttgagtatattgaccatgacaggccaacttcagttcctatatccggattcaactggattcattgcactttgattctaccatgaaaaacaatgcctttgtgtaaagtcatgagcacttctttcccttcttggttaactgtgtttagatctttatcatataagacctgactttatgttcattgttgaaattgttgctggtttcttttgctcttacacacccatgctggcctccaagaacaacttgctgtcattcaggagcttgcaaactcattgctttaattaattaacggaggctctttggaagttagggtcatttgtttttaattttcagttaaaggcacctatggatttctattttaagaatagacactgtctactttacttgcttattatactttgatactaaaatacagctataatggttctgcagcattgccagttatttaagtattcctgagtatttaggtaaaggctggatggcttggaactactctaacatggcaaaatatgtcatcaatgttttgctccaagagtatcctgtaatgtatatgctcaacttgagaaacaaaatatattataattttaggtttcaaagcataaatccttaacatatttactggttactacatgctgggcacagtgccaggctcttaagtgactgcagtagactgtagacagatcagacttcttgttctcatgaagcttggaatctagtgggatgctcattcattgacctatgaatacgtactgtgttatgtgccagacactgtgatagatcctgtgctttgccccacaggtcaaggcactaatatagtattatgtttggtacatagttggcccataactcacagtaaaattaacctttccattctctttaacatattacattattacatattaaggaagaatgtgaaaaaatgtaatcataatatcagagattgctttttgctcacaaaaatccacattttctcctgcttttggggtaccaagctagacttcatttcattctcctttgcagttaggagaggtcacatgagtgtgtcacactcgtgaaagatatggccacatgtgtgtattttagccaatgaaatgttcgtggaagggatgcgtggcagttcatgaccaaggcttttgagaaatggctgtgcctcttccacattctttccctttccactggcctgatgcaaatgagaggactcaataggagaaggcagagccacaaaaattacacctggaggaaattgcctgtattggccttttgagtaagaaagatgtaaacttctattgtgttgggccactgaaattttgggacttatttgttacagcagcttgtataatccttgttaatgcagtaacaggatagttataagatggctcattataaaaattatgacagattatcaaggcatattccaaaaaatattatcatttggcaatgataatacatgtcattcagaagctgaagtttctcattgtcaccttgcgggggtatattgacaaagattattattgccattcaaaatatgaacactggatctcacataagtcatgtgacctgccaaaatttgcaaacctgaactacagaggagctagtaccagcatctaggtattctgtttcttagttctatccacccaccccattatactacctccatgatatttatgtctaaaattattatagttgtttgtttctaaattttgtctgcttgctttccttgcctgtcttccaccagcagattatagtgtctgtgacctaagactttgctatgtgccaggcaatagccttgcatatcctcacacagggatacactgccgtatccctagctaccaggatattgcccagcacatcgtagactctcagtaaatagttgtgtcatgtaagaaagcatgagtccatgaccagaaaataacttttcaagtcaggcattttgtaatgcaaattaaacatgggtcttatgcatttttgtgaaagaaggagggaaggaaggaataaaagaaggatgcattatatatgtggaatatatgctcttgagggggttggaagaagaggaaggcagaggatgaaggcattgaggtggggagggacaaataatttcccattcttaactaattttttaaacaactgattgctgtttgcagaagatgcgttggcctaaaatgatcataatcttttgttagcttataatgcttaaataggtcacttaaataggactcttctaatagaagagaagcccattatacagattaataaaaattgatagagacttgaaaactgctcatggggtcagttatctccaattaaaagttcatatgccaagaaaaacaagcctcttcctcctaaattattactgtgaaaattttcaagcctacagaaaagttggaaaaatagtacattaaacatacatatattctctacctcagttcactgttaatattgggccatatttgccatttccctatatctctgagtctgcctgtgtattatatataccattttattttattctattttattttatctttcagatgaagtttcattcttgtcgcccaggctggagtgcagtggtgcgttctcggctcactgcaacctccgcctccccggctcaagcgattctcctgtctcagcctcccaagtagctggaaatacaggcatgtgccaccatgcccagctaattttgtatttttagtaaagatggagtttcttcatgttggccaggttggtctcaaattcctgacctcaggtgatccacctgccttggcctcccaaagtgctcggattacaggcatgagtcactgcacctggcatatagataccattttaaatgagacatttaaataaattacagacaccatcacacttcatccctcaatacttcggcatgggtctcctatacgtaagggcattttcctgtgaaacaataataccattatcatacctaagaaaattaatgttaagtcaccattgttacctaatatgtgcagtccatagtaacatttccccaattttcccaatggtgtctcttgtaactctttttgttttaatccagtatttaatcaaagtttatactttgcatttgatggttaaggcttttaagtcttttccaatctagggtgatggttctcaagggtgggccccagaccggcagtgtcacatcactggggtctccgggggtcgatccagcaatctttgttgaaagaagctctccaggtgattctgatgaaactgaagagcgattgatctagagcatgttcccacctttcctacttttcatgacatttcatttttatcaaaagcccaggtcaatttcattttagaatgtcccacattctgaatttttctgaacattccctcatggtttgattcaagtttaacattttggcaagcataggtgatattggcatatttactgcatcatgttatgaggcacgtgttatttaatgatcccttttccccttcttagtgatgctaagattgatcatttggctaacgtggttaccgccagatggatcccctctaaaggctatgttcccctttataattaataagtgacctaaagactgtgtgaatattttcttccccaataaactttcacccaatagttgtaacagccattgataatacttgcctgaattactatgttggtgcatggtaatttttctaattttgtcactccttctatattaattagctgtcattctttaaataagagctttctttcttcccttgcatctatttgtatttatatttgcttaaatattatgatggactcatacttattaaaaaatcaaatgtatcaaataattactatcatcattatttccgatattcaaatagtgccaaatttgttcacgagagagcttcttcaaacttctttctgtgctctttccctgctttctggcacaacaaaatgttctaggcttactgtgtacattccctgccccacaacatgaatcagccatttcttccagtagcccttgttattttggaaaccagtatgtggatgctagatgccctacacacgtgcatgacttgagcacatgtgtgcacacacacagtcatatgtgtatattttaatcataatttcttacagatccctccaattcaaatttgcagagctattgtcaccttcttcttatgcttatcctttctctctgtaggtcagaagtctgaccttggtcttcattgagctaaaattcaggtgccaatggggttgtacttctttctggaggcccaaaggaaaattttgttttcttgccttttccagcttctaaaggccatacatattccttgctcctggccccttcctccattttcagagccagtgacactgcaccgctctgacggcttttccatcgtcacatctgcctctctgatgacagtcttaaaagcttcttttttttaaaggagtgatgtgattagattgagcccacccagatagtccaggataatacccccatctgcaaagcctctcttgccatgtcacataacgtattcacaggttccagggattcaagtgtggacatcttgagttattctgcctacctacctcatcttccctcattcttagttttatttctcttctctctgaaaatcctgacttttaacaacctcagtatatttacacattttctctgttctacaatatacacaaaataatttgagaaggataatagcaataacaccaacaacaataagcctactaagttaaagctcaagatttctttgtagttttctgttacttagaatatattcaggcatgtagttgaagtactgtgttccaaaattactttaattaatttctttgtatagttgtactatagatttaatatacaattaggttcatttttttctgtttgtattcagacttagggttcacattttccatcctttccaatttattttatattttgagtgtgtaaactatatgatgataaagagacatattcagagaagtccctgtcccatccatatcccctttaccctatttctacccaccagctacacattgtcattcttagtctctggtttatccttcccacattctttttggaaagcatagatggacatgtgtatatgggtttttttttaaccttgtttttacttctttcttaccaaaaagtagctgagtttattgattttatttttgcttgttgcatttttacttaacaggatatcttgcatatatatgtatatatatatgtatatacatatttatatagttatatatgtatatatatatgtatatacatatttatatacagttatatatatgtatatatatatacacacacacacacacacatatacagtatatcctgggaatcactctatattaggtagtcatggaaatcttgaaaggagtaattattaaattcttaaatacgtcttctggattgtttaacttgttacaactctgtataatatttgtgacttaacacaactataaaaaggcaggcattgaaagaaaatgtcttgtatgccttctgcccacctcttccctccctgaggcagagctaatttttttcctgtgtttgcataacattttgtatattaaagtattatagcaacttttattatagttatttttatttgacaaaccatctccctttctggcctgctagttccacaaatgtacaaagaatttctctctttccttttcttttttctttctttttagaggtgggagtgagtagcaatgattatgcctggcatatggtgtttctccatttacttattttgcctgaaattccattagagatttagtcagttggtctatttttataatagcgtctattttaaaaaaggtataacatcctaatatgtattaacttatcagagactagccacttcttagaaaagctatgaaaggtcagatgagaaaaaaggacagtggtgtttggattctgtctctgatagaaaccccaaggaaggcaaggaagagtacaagggttgtagatactctaggaagaagagaggatgaatcaaggaaaggaaaagaggagacagaaagagaaggtctgtatcatgatgtccactatgtgaggtactcacagcacaggaaatctgcctagatgataataggagtgatgttcattaggaaagaaatagccccaaggagttttttctttacatgctaagaagctgaggcccagagagatggaacaggtttcccagggcaatagcactaggaactggagctgcaaacttttgagtccaccatatccaccctgagttgaggtgatctttcttatgatcctgagagggaacctttgaaatcaagcaggcacccctacttccccaggggtgggcagagggcctgagcaatccctccttttagagcactttgcagctgggccactcatctcaagattggaatgtgccatctccatctttcctgacctccttcagtcaagtcagctgtatttgtggaggtgcattgttcagtctcagagcattgtttaaatttaaaatcaatagagaaaagtgtgccagcgagaggcacagactgattaagtgctgtctatatgaagaggtttatcctctgccacatttctgttgaaagcctgtgaaacatgaataggatggagcaaagtgaaaacacattaaaaattatgtcagatacccaaatgcagtaaagcaactgcatctctgacaggtaatcaagaattgggtgactctgagttctgatttggcgtaatgatatcaacatgttcacacacacacacacacacacattccttgtatacacataacacacatacaagatacacacacgaagtagacacacaacatgtagtatgtgtattgtataacacaacttacataaagacacacagaagacacacacaacacacatacaaacacctacatgcccatattcaacacacatgcacgcaaaacatgcaacacacattagtgcctgcacacatgtgcacatgtgcacacattgagcaacacaataaagatgtaacttttccatctcccaattcattctacatttttattttgatgaaaagatagcagtagagggggaaatctcttcatcagaaaatacagtgaaaaaattcccaagacattgtcacgtattactggttatttttggtggtgaagagaattatttgaaaacaaagaagcctttcacaaagcctctaaaatacaaaagatttaataacatttacatctgtgtatcagccatgtctgtaatgcgagtcatgaataacacataaaccagagcacggaaagaacagaagtgctcacacatcatttaaaatccaacccaccccatcgtcggtggaatcaaatacacagcaggggcagttccagttgctacacacacaatagagtcattggaaatgaaaacatattaattatgttccttaaggttaggagagaaatagcaggattcactaaacctttctaacttctctgttgaaaatttgtaccaaagagtacatcctgggttgcctctttatttttcctaagaaactgcagaatgagcatgtgtatttgttttgttttactgtttattcgagtctgcacttggggctcagacttgcctcattgttgtactgaaaatggaagaaagttggcttgggaagatggatctttgttacgagtgaataacttgcagaaaaattacttgttttaaatgcttgacaatacctgcacaagtcccagtggtatatgtggaaattcttgctgctatgaaatgagtcatatagtatccagtcctagcacccatggagcaacatgtttgaccatgaaggaaatcattccttagtctgatttggataactgtccgtggcccaaatttggaattgtatgttcctaggtccattcatttggctcctatgtatatccagggtatccagggatcttctaggctggtgagagatcatcaaactctgctaggaggcaacctctagtgccctaatagagaagggtgaagccgggaatgctggctcacgcctgtaatccaagcactttgggaggccgagttgggtgggttacttgaggtcaggaggtcgagtccagcctagccaacatgccaaaacctcatctctactaaaaataccaaaattagccaggcatgggggcacatgcctgtgatcccagctacttgggaggccaaggcaggagaatcacttgaacccaggaagtggaggctgcagtgagcccagatcgccccaccgctccagccagggcgacaggatgagattccatcttaaaaaagagaaggataagttcagggaaaattgaactgatgatttttgggtgagttcatatttattctttaagtcagtattgtgtttttgtttccaggggtaagaagatgttcacataatgctaatgttagattagcacattttgtttgcaggcttttgttttggcatttatttctccttcttcctctgctcactatttccccttctactgctaggcttccttctgatggtgtcagaacacggcatgccagtccagagtagtttaaaacgagctctgtaaatgtcatggaacccctgcctctgcctcccctatgtgtctcatttcagtgtaaaatttcaagcacttccctgtccttacgccgcaaaaggttaatagtcatcttttttttatgtactgtaaatgctcaattcctaaggatagtgtttcagggcaagttgagtgtaattgctaaataatatagtaattctctttttaaatgagtcatacttgcgttgttccagatgctcctgcatgcatgtgtgtgcatgtatacatgcatgcatgtaggtgtgtgcacgtgtgtgtgtgtgtgtgtgtgtgtgtaggcaggcatgagtgaggcctccccttgggggaagtcacagccatctcataggagtttgcacattttcacatttgggttttaaatgttgtgccacatcctgggcttttaggtgctgcggattatgtataatagatgacctgcatttacagagatgtgtgctatacagatgtaaatgttattatagcttttatattttatgttcttgttgaaagatcattttgtctttgaataatatggccgctcaattttttttggaggggagggggttatctttaaaagagaatatgaaatggatattgcacatcatatatttcttaaaagtaatttggaattttagggtctgggattggggctgactgatacactgccgtgatgagatataacccctggaaaataacagcacccgcacatgcctgcatctgtctaacctcataattcactttcacattggattatggatgtctgcgttcagtgagtctatcttccctttaggtattatttcagccctttgagataataaggaaagtttaattgcgttgttaattgattttttgcacaacattattaccttgattgattgcagagttgatgaaaatgttagacacaggcagcgtggagtatcagccaggcaaggagtgggagccttgtggagaatagataaccttgatgttaagagctatatccttcagatatgtcttcccttgacatattgatggcccctgaaaagggaaaagctgattgtatgcagaatgcaatcattaaacccacttcagctcactgttgattaatttgttttttcctgaaggatctagttatagggaaggcctcacttgtaccaaccacagccattttccaggttccagactgtgcttaaccctctaggtgaagggaagtgaggaggctggcttgcctgagacgggaagattatcttagggtgcgcagggtgtgtgcttaaggctcacaaggtgtctccatgctcgggaacactctatgtccttcaccatagtgctgattttccttaaattattgattctttaaaatgccaatagcaaggaacccttcactgagacctggtgtaggatgaaactgtcacttggagattctcaggaaggtgttcaccagtccagtggtgtcgggagagacatggcactcaggagcttttattatacattaggtaaaaccctgcatgagattgcccccatgattggagaatttagttgttattggggtgtgcctgtgtgtgtgtgtgtgtgtgtgtgtgtgtgtgtgtgtgtgtgtgtagagagtgatgataagaagggatttctgcagacagtttcttatattgtcaattactcctctccctggccttatatgacactttcttagaaaagtttattgaaagccatcatcattttttctgagtccagggccatcttcatggtagcaaaaatcaggttgattgatcagttggtttactgattgattaataggacttctgtcctgtttccctcccctcaactcacaccacttcattcgcaactgcccaaccctgcacagagactcagtgggctgaatttatgggcaaagaagttgcccctctggaagaatgcaagctcttatacatgcagtactcctagagagcctcatcttctagggagaacggattgctacttctgccaccccctcgccagcttccatgcttattactcatggaacattctggcttattttgccctcttctttcctttgtggctgtgcccaatgttcattcaaataaaatttcaattgtatagcattgctggaggcctaccaatagttacatcagcttcctggagtcctgagccccccccaggagaggtcatgtgggcttctccctgcaccacagagcaccctgtagacggaattctctgtgtgatgctaagcacagtttctcctcaggctgccccaccgcctgcattatgagtctttcttctcctgaactcaccactggtgctcagggagtctaatatccatagagtcttggccctcaattaccgtaatggcttataatgagattttggccaagtagcaggtagcaggttattacttcctgctcagcgtgggcaatgtctacgctgttaatttgtgttgccgaatgtggcttagagctgggcatcaaactgtcggagccagatgtattctattaggtgcgaggctcacattggcccatgggcaattttttccccccaatatggaagcatgttaacttaccacagggtgaatcctgacaaattcaagccagccaaataaaaggggtaatatcccaagccatcaaagtagtacattctagggacagataacacctggtaccacccactgtcagcagtgtctgtctgactggggcattctattgataggcaaaaaacacacccatcttaatattgctggagaggctctggtgccttcattaagttttaatgagcctgaccctaatgaaagcccttataacatgctcttctactattttccttgtctttatcttgggtagaaaaaaatgtacagaggttcatataactcttataacctgctttctactattaattcttccttaacctacagtttcttgcattaacatatacatacacatatacatttacatatatacatgcacacacacacacacacacacacacacacacacacacacacacagctttttcccaaagcaggttagaggatgggaagttgaagatcaggaaattatgaacatattttaccatttggcactgggatgagctagtgtccaagaattatgctgtgctttctgcaacaacagactgggtcattttttgtaaagcaaacttctttcggttagattatatatcatcagattccctttgttttcttttcagagaaagcaatttagggtgtgctggaattaggaaagattatggtgatatcagtacaggaagagtttgtttggattctaatgaagagcaggtggaggctggaccaatgggcccaagtaaggaaggccttttccccaatccttgcagggtttgaattatgacaaacccagttgttacagggtctgcttaattttatttgaaaggtttctttttttttgttttttattttgtttttttttttttgtagcttgaagaattaggaaaacaagaaagcaaattgtctttattttcagtgactctcttgagaaatttcagcctgcagaaccagacagaactgtggatgttccctgcttttgatgtaagctctctaataggaacagatctgaagcccaaaagcaaatttctgcttgagagcaaagccaaaattcccattcagactctgcaggaggacccccactgctcagatttcttcatacaagattctgtcagttttggggaagtccaaagtctttctgtgaaatttttcctgcaagttattttttgattatactccataaatgatggttcagatctattctacatatccaaagaaactgttttcttcttttttcctgttaatgtaattgcacattactaaaatttgaatgtttatggtttttgttttagataaagagctggaacaaccttttattattattattattattattattattattattgttattatttaggtatcattagctttcagactgctattggggataaaataaaacctccatttaccaaaactcaagacactagaaccctcagttaaccagatttttggatctctgattttagacagtcttgattttacaagagtaaaaagcaatgtcacgagttttactttttaaaaagaaataagggcccctctgtaggttgtcctaaaacagtgtttcttaaagttggtccctcagcatcggcatcacctgggaacttgcaaaaatgcatactcttggccccaactcagatccatggaatcagaaactctggggaacggggcttggcaagctgtgttttaacaggccttctcagtgattctgatgcatgggcaagtcatagaaccactgtcccagggccaacccatacatttctacctataactgtccagggatgtataataaatgctggggttcagaataagtatgctgagatcttttcatctattccacaatttaaaaacaatgtactgcatacctactgtgcccttggctttatgatgcatgggcgaaagtctattgttttcgattttttggagctcatatgagcaggagatcctaagatcttgagaaatgttcaatctgcagtcttcccaccccagctaatctcctaactgtactatcctcactaaaggcactccagaaatactcagttgtggtcactatgattacctagtaagacagtgaaactgactttgcttttagtgtcttatgtgtgaaaattcaaaaaggtttctagctaaccatgagttaatgagataatttaattaacaaggacccaacattctccgagtggctagttagtcacatgactgttatattaggaaagctaagaagatgtgtgagggccattttatacttgcctcactgaccacttgagaggcctctcggctgaaatggagaataacacctggacccagctctggtttcccctgcctagaaggccagtaactccaatttgtgtttactccttccctgattgaatccactcatgtatttttatcctataaaattctaatttaaaatgccattccctagaatgttatacctttattgctgtttgtttgtttgtttgttttttaataatgatatgtttgaaatatctagaagcccacaaatacctctttctcctaaagggaggtgatcatctgttgttccaggtatgaaaatagttacttgacccatgtaccagagaccaatgatggggatcagatgaggatcaaacagcagctggaattattgtcatatttttatctgagtagcttctgcctctcttttttgatgacactgagaccaggtaccctgagagggaagacaatgctaggtagatttgtggggagggggagcattaaaagaggataactttgtgtgtattgatccatttttcatttttatttatttttacgttttttacttttttgactgtcaaatgatggcatatctttttgaactttcatggtaaaaatgatgttttccacctaagaaatgcaggaaatctttagtattttgaatgcttctttacatttgtggaggtgatatgcaaaaatccccaatctctgagcctggaagattaattagaacaattgatggtaaagaaattcagtccctgaaattgaggcaagaagaaccccaaaatggggggcaaggagtgtctgatagccccattcctgaaaaccttcagcacagattgaccaaacatgacatactgatcattaaggaacctataattggtgaccaaaagcacagtgtggctataatggctctccctgaatagttgccgccatttatttatttatttatttattttaagcaagcggctgctttcctaacttcatgctgccctctagtggtgatgctcccgacttcagctagaaggtggaaaggatgaatgtagagataatggcgggaatggaggaggtggtgacggggtggctttttcctttctttcttttttctctcctgtctgaaagatgtctgagtttctcactcaaacattgagaaagaaacgtgaggccagagcacttgaccactgtccgctttgactgacagcctggttgatgtgacatccatcacggacccgcactgaagggcacttcacaaatctgaagggattcgcatcccatctcggcatgcactttggaatccagcccatctcaaatccattaagccctacctagaatacagacataggagagaagggaaatacactcacaccaaactagtcttgcagttcaagtttctctctaagaaaaagcaagtaagaatgagcctgctaagtaagggtgtgggtgatctttgatgttctccggagacccctggttcctgtgaacaggactgaacaaataaataatgaatttgaaaagtaagcggaaaagcaaaatttatattcctgtcgccaaggcagtatcttataattcagggatatttctgggctagatagagttgtatgggtgcctggtccggttctgtcactttccaaaagccagttggaaccttatttttctccgctgtaaaatgaaagaatttacctaaaatgaggttctttaaattctttctcagcttgagaatcctccaatacagttaaagaaatacttacaaagaaaagtttaccattctgtattgaagcatactaggcagtacagcaaatcacagagaatccttataggacagtataagcaattcattgtttaggaagtcaagaataaaaactgtttcaggcttcatctttggcttggaccaaaaaaaaaaaaaaaaatgtaacctgaggctaaaaaacaaaatttggactgctaagaagatttagcagtttatttgggggctggggaggagaggggttgttggagtaaggaaatatttaccatggagtttgacctctcatatttataatacatttctgtttgattgaaatacaatgtgtatagaggtaggagccaaaaaagggagctcccaataaagggggctagtgagcccaccctccaatctgagaatctttctgtcagttggtactcacttgttactacccccaatccaaaaaaataggaaattaaaaggcattgacatctaagcaaaagtacattgtctgtttcctttccaggattcacataatggaaatattccctgccagataatgtttaatctgttagcctaatatttctttcatgtggaaaggactgaatggcccactcagtctggatagagccacaacgcctgtaacctgagtgtggggtccaggacccaagatgggagagtagagaatgtcactaaggatctgctcaaagatgcagtaatttctcagacttggaccagcttttccattttccactgacagattatatgacagactatatgaggaacttgccctgcatttttttctcctctctttccttccccacctccccttcttcttctaagatgacaagcctcatttcagctgccctgggagcccagggtatgttttcttgaggctctggtttgtcacacgacaatgagcctgcccactctgtgactacctgtgtagcctccctggtctgggaggctagccccacagccttgcctgctgatcaccttcacgacaaattttgccagtatcccttccctgctgactgacttccttcccctgtttttccttccctacaaacaagtgggtgagacttgacaaggcccagcatttgtctgagcaggctgtataatctgtcctctcccagtggaaagctgcactggacgggtctgagcattggagtcaaatgccctcttgtcaaaaggataggttgcctggcatttttgctagctttctttccaggtatggtgcatcctaacccttgaattggtgctccacactctaatattttgtctggcatttggtagaagacagcatatcagaaccccacagtttagaccctatcatgcacttggtattcacctttgtccttcatactctttgtgctaagaaatgaataaaaactagtgtttactctactttatgataacaatgttggtagaaataatcaacctgggaaaaaaaggacagcaactaatcctgcacgtaatataatttatgatgaatgaaaaactgaccaaagatttatatcttgttgatatattgaaaaccacacaaatacatggggaggaattaaccttggtagaaataatgaaaacaaaataaaattgaaatgagctaaaactacacacaataaaatttgttgactaaagtttaagagcagactcaagtcttcttgtcgcaatttagatctgcaatattttactcaagaaaatgggactttgtaaaaataaatgactctaaaagagatttagaagatgtaatcagcacaatttaatatttggccagagctgattgaggaatttaaccttactgtaaaaattacgtgataaagaattgatcccattgaaaataaactcaataaaatagaaatgaaaatgttaaaaatagaaatggttttttgtatttaaaaattgattaaggaattaaattggctaaatggagtttgctgtgaataattaatgctttctcaaagacaaattaccagactagtttacatgtttgtatttataaacctgaagtcaaagcattcctggactcaaatttggagaattcaaatgtctaccaatgcaagacatcagggtcagtgtagcagggtaggaataccccttgtggtgttgtttttgtacagtgaaggtgaaacaggaagcatggtttgaagtggtcactgcggtatttagcaaggacagtgtgcagtatccccgcccccaaccccccacccccggcccccatggtgcaagagccctaacagaggttttgggggttatagcatgcactgttgcgatgcagtaccccattcccacccaatatgcagatgataaaccgagacacttgcctgaagtcctgctcagctaggttgggaaacaagtctcacactttttttttccttctccaccctcccctgggtaaggtgtagagcctttcttcatttcatctccaacctaaggcatctcagatgtgcggcagatgaagggaaaatatactgggtggagaagaaggtctttgtcctccttcctcaaaaactgcttccacacaatcccttcccctaagaccttttaaagtctctcttctttattctgtcttagtatttaagtagcttacactgaagtaggatgttgtgctaggagcctgtcatttctcaggctccactaaatcctgtgtgatagccacagcagagctgatagcacatcacatgggctgacctcagggtattgctccagctacttctcaagatcataaaacatgggtgtttattcctttccagttccccatgtattcacggcctgcacttaacaaagactgaggaatgtgctttctggggaatgtcccttcccactgtatgatgtttacagctctttaggccagatgataatgttcactgcacttctctcttttcaactagatgttgtgattgctttgtttttgtgggaggaaagtgtttggggtaaaaacaccaccacgatttaggaactgtggctgttgcctcctattactctttgttgttcaatggggcaaatatttaatccgtatatattttcagagtgtttcaaatgtctgaagtcataccagaggttaaaagatgagtgtccagcaattgacattccttactttgtggattctgtgtaaattttatgtacatgattattttaatggtattaatttatttaacaaatatttattgaacatctcatctgtaccaagtgcagatgctctccaacttacgaaggttcaacctataattgtttaaccttacaaagccgtacacatttgatagaagatgtaaccccattgtaagttgaagggcttacaacttcagatagtttcaagtaatgatgcatttttgatttacaataatttcaacttacaataggtttattgggatgtagctccatggtaaacaagatgcttctgtatggttttaggtaccgggtgttagaaattggggaggagggagaatattataggggatgacacatttatggacatgtatagagtcccatggaaacattgttctagagccttctgcagtggaccaagacgctcctgatcaccttttcctctctgtcactgggcccatctacctcttcacaacattgttatcaccttttgcaggggtcaggaggtacctagttccttcgtttctcatacagatgagagaacaggagttctgtgggggaacccttcatcccctgcctccatcctaggggtaattataaactcctagtatcacaatgggatcaagatatgtttgtgatttcatagctacatttataaactcatatgaaatgcatttaaaataatgatccctaaagtgatgactaccaaaactaacaatagtgataattattctattttacaaatataaatgtgttggtccaacctgcactccaatgtcaaatgcatttttgtatttttatatgcagattgtttttcaccactaaaatattaatgacagaccacttgctttgatggctgggctttagttctgttgaatacggagttatgagacttgggcttatgccaaagccagtgggatacagcttagttagtggtcagcacttctagctgtatgaaatgcagattgcaggaaagttaatgaaaaccctttcctcaaggattttggggtcccccagaggcccccttctatccaggttatactgtggggttacaggctggatgggtttcaagggctgacttagtccaaatcaatttttttattgactgacctgttgaatttgtctcctgcatcaggcaatattggacctggtgttctcatcttcataaggaaaacattggaaaatgccaaatcacctatttcagagctaaaatgaacctctgagattatctggccccttgcccttgttttacaaatggggaaacctgcccagtgagagaaagggatgtgtacatggtcacatgactgttggggcagggctggatctaaatgcaggtcttcccccacttccccttactaaatagactattgaactgcagctggaagtgtgaggccatccaggaatcagggagtccaggatgctggatgaatggatgtgcaagaattcccttccctggactgggctctcagggcctcccccagcaaaatctctggtactgaccctgcagtcccagcctcacatccaagaaaggaggctgattcccacccacttaggcagccccaaggttataacttaacctgcataattaggatgtccattccagaggggaaaaacatggaaaagataaagggcctctttaaaacagattcttcctgatacttttttttcataattatagctttaacagcttatggtgatgggaaagctggctacttaagaaaaattaggagtctcatttggcaggagagaattccccaggggatgttgccctgtcatttttcagggtctttcgaaaagaaaccccacacagacagctgcacgtcagcctgacacagggcaagcctgctttacttactatggccaaagccagatcttttaattaaaaacactgcatatgccattaaatgtgttgttccccctccagtcccaagaagttgtagtttgaagagatagaaacaaatgaatccgttgcagatgtgtagagaaaccattgcctactgagtcacaaaccagcgggttcccaaattccagcctcggagtgcctccccatcaaaatgttctttgcaagcaaactgttccctccgtaattttcacagttgatggcagttgccatggcgggagaagaagggctgtggggaggacgagggagagagaaacacaatgccacctcacttaatttacgagcagagcctcatattttacaaataaccttcatgataaataaaggcctgtggccacacatgggactgtgctgtttcgtgcatgtttgcttttcctggttaattttatttatttatttttgaacacaaaagtcacatattgggggtaatcacatcccaactctgagctctgggaggagactcacagaggcaattctcgcttaatttcagctgctggagatggtttgagtttgacaatttcagccgattcttagcattgctagccagagcacctttctccccgggcgagcaccagcagctggatctcattttcaactgccaggccgtccccacgccttcctggagcagcccacagactgagtgccgtcctttctgggagtttattcaaggtgacagctcctcacacaatggccttctgatcacctcaagtagccaagatatcagtggggtcgggcgtgctcctcctgcaaattccaaatttagattgactgaggttatccttaggccccttgaccccaccactccagcagaacagaactgccaggacctttgcagccacagtgagttttgtaatgatgtctggggagagatgttctgcaggggcaggcagagacgaccccaagtgatggggagtgatgtcagctttcgttagagccgcaggcagcgttagaatatccttggcataatatggcgctggtatctctgtcagtatctctgttttctgtcaccgcacacaatcctgggcctgtctgcaaccctgatggtgtcttttcagatcaggctgttgccagcacagagactagctcggctcttcaccacacagcccctttgtttgaagtctgcccttttgtcgttaatgcacttgatgtctatttaaatctgacagtgaatgcagtatctgttttcctgtcaagagatcattgacaatattaatacctcatgtccttgcctcattttccaagtgctgacacctagccgcagtctcctgcattcatcaaacagccttctctcaccaggatgtctataaacattcttgcttccaggcccaaagaaacagggtaggccttaaaaaggacttttatcaatgccagccagaaagaaggctcgggaatgtggcacagaacacatcccagcccacgttccaggagcatccagcctgtttctagggcggcacttgccattcaagttgcatgtaagtgagatctggagtcgaagtttaccctggagaaagggaagaaaaaaaaagcagttgaatccgtgaatgtactggagagtttactggagagagggcactcatggtgggtggtgtgtgtgtgtgtgtgtgtgtgtgtggtgtgtgtgtgtgtttgcctttcatccttttgcttaagagaaagattgtgttctttatgacatccgacagacctatctgttcctttttattaaaattcatgttatcctagtgccatagaaataaattagcatcctttggccccatgcttccacattcttcagggtttatttgaatcaattatgtttaaggaagccctctgtggatacctggcagaactgaggcactcccacccaggcctgtagtggatgctattcctggagcagagcctgatcagccaagcccacagaccagcaggatcctggcatgggtgacaatattagtacaatgctgatggctacataattcagcacgataaaggaaacagctcaatgccaacaactaaaagaataatttaggtcccaagaagggtctcagtgaggttccatccaagctcaaagtttccaggcaccagaccaatactgaaaaccagaaattggggattaggggccaaggagaaagcatgaccaaggaggaggaatgagccacagtaaacttactcatgggaacatggcaggaagtaaaactaatgagagtgagcccaaggccagctttgaggccgtggaacaatgtcaccctctctccattgccaactctgatagactatttgaccccagcaatttctagctttgttccaagccatccaaaccagggagcatctgctctgtccttaaaagtttctaaaagtcattttgatccttatgtaagaataaggtttgaagttttgtagtggagaaacatctcttttacagttgcaaaaatatttactacttagaacttctgatgtgaagaacctggttaatttcaagtgctaatttatcacaaattaaccaaaaaaaaaaaaaaaaaaaaaatgggcttgttggtttcacactatcacactgatggaaaaaaaaatcatcatgtccctaggtagctattttcacaggcagatttgtggctattgaatgactgtcttatggacatttcctttctttgtttttttctagttgtgtacagttcagagactcaagtccgattagcgctaagacaactctgtccaactgaatttaaaataggtttttctaaaaatagaagaaaataaaaatgcaggtggcaaaaacaaaacagatttttccttgataatcctacagagctttcataataactatggaagtgatttcttatgggcatttagaataaataatgagttgattaaaaagttcaaccctattgtaggggcatttttcattgttaagtctcctacaatctccttgaatgagaggagagccttatacggagccacagagttacttaaagtaaaactgaaaatggaaatcaaatgcattctgaccagagaaagagagttcaggattcctgtaagaagccatttaatgggaggctcttgttcctgtccatgtggtgtttttttttgtttttgtttttttgtttttttgagacggtgtctctccctgtcgcccaggctggagtgcactggcgcgatctcggctcactgcaagctccacctcccgggttcacgccattctcctgcctcagcctcccgagtagctgggactacaggcacctgccaccacgcccagctaatttttttaatatttttagtagagacggagtttcatcatgttagacaagatggtctcgatctcctgaccttgtgatccacctgcctcggcctcccaaagtgctgggattacaggcgtgagccaccacgcccggccattcatatggtattttgtcaacaccacctctcttccttaatcatcccatatgtgctcaatgcctggtgcctgccagaatttggaatattctctctggaagtcaacaacattgcttcatgataaagggtatcaaaatagtcacattctgggaagattgttctacatcttttacttgggctgggttcatctttaaactcttaattttccattctttgaaactctactaagggaaactggcgtgaggagaggctacattctggggagtaattggccaaattagaaaagtacctagcatgtggaagagaagtcatgcagaaagtgatattcctaggagcctatacttgtagtgacattttatttcaatgtcaactctgaggttgacagaatcttcttgtctgtgaggacaaaaagggagagttcttcccttctggagcttcatccactttctgctgcccattggatctatgattatcttgcatgtctgcttttcagcacctgtgtttccctgctatgctaagtgtgccacctgtaatgatgtgtgtctttttatttgcaggtgtcctggggaagtgtcgctacgtttactatgggaaaaactcagagggcaacaggtttatccgagatgaccagctctgaagccaacttctgtataccttcacccatttcatgaaaataaaatcaaaagggaaatcaaaaataaagaaaacgctaaagaaaaaacaatagcccacattgcctctctttgggaaaagctatgacttcagcttttggtaccttccgctgactttgccaggcctgtcaagatgatccttctgccttagactgagtggtcacatagagattgacatgattgcccttaagcaggtctcatccaccagggtgacagacagcggtggcaaagcaacagggctgacagcatgaacaccatgatagattgcctggtcctgccactgctcacaggggagcagaggtcacacctggggcctccctggacatgctcagtggctgcagtcaagtgagaaagactgtcctcagctcgcctattgaattgaaatccctctgataccatcgtgctgtgggcttatttttagtgaaatagtcacagtttaggggatggccattctccctcactccttttaaatcttaacgtcctgtattctgcatatacatagctcccgtctcttcccctccaccttcctttagcatcgattttatgacaggtggtgcatttcagtttgcagtttttcggagaacaaggtataacttcccagccaggtcatacatttatggctggcttcatgttgctacaatccctttattggcgtaaatagctttccctaaatccctgactacaaaagcgtggacttttatcttgtttcattcaactctaaatccacttcttgccctgaatatgatgcagtgtaaggcataaggcatctttctcagcatgagggtttggttgcaccagggactcttatttattaatttatttttaaccgtacacacttccagtgatgcctgtggccatacttgtgcgtggggctggcttgctcctttgggtgctatttaaagggagtgaggtgatgaaagatagagtgaagggtcaggaggttaaaaaacaaaattaagactgttgaaaacacccaccagaccaaagagtttttatagaaggcacaaaccttttggattttgcatctttgtcatgacctctcagaaatcaaatccacaggttgtgagacagtgctctgtcttcctgtatgcttggctgtgcactagcactaatgtcacaaggaacataagtgtgatcattgctagttgggtgactcaaagtttatctaacttgctggtgcaccagtcaaatcactctagaagatgttcaaaaggttgattgattgttcttgacacgatagtgtttatttttctgcttcttccatttagaccaagtgttcattgtcctcccagtattaggtcagtttgatgacagcaaaacctgaaagagaatccctccaagttatagatactgagggactaggagctgctattgtaaaactatggggactcagaatccctaagctgcccaaggagaacctactttctcagctctagcccgtttacatagcctctggcccactgagtcaacacaggccttgaatgacatgtattgaggctggcaggagtccctgtttgagattacacaacctttgttaatcagttctttagacaagttaacattaaaatcctcaaaaccatgaaaaattggagaatgttgaatgtttgcatttatctctcaaatccattagtaactggatttgagtaccttttctctgtttgatctacaaaacagcactggaaaaatgctttaaattatctgcatttggtcccaccctgggtcattgtttagaagcatcaacacatgttttctccctggcataatatgggcagccagaattctgtgcaagggcagctagacgagtcagatgtcatatccaatctagccacacatatatccttgtctttataaaaggctttaaccctgcctcaaacaataaaaaagcacttgtgaactgaccacagaatttttccatctttatttttcttacttgtttactttttttaatgtcagaaccatttgtatcatgcgcaggaatgtctccctcaatgtgagctttggaggcaaaacatatttttggagtgagttattgaccacattgtttccctctctttgggttgtttattttcttccagaatggtgtaataactttaattaagattagctttaattataaattacctaaaggccatcactaaggtatattcatcttattgatagaattatagtcagctttgtttctcttaagcagggatagtgataatgaagtgctgggttggttacagttccactgtgtgttaaccaaaatttgctgtgctagagctagactttggtctgaattggcagaggtagaacccatgttgcatgtttatcctaaatctgtaggaatttcccaaaccttgtttttcaaagttgagaagtagaaagtaataaattcaatcagggcccagacatgttttgtaccccctttaccctttggtctttcttccttttatcctattccactgagcttgttctttggggattgtggtgcctgacatcactgtctttcctcccctaggacactgacttgagtggagagacctcggcaattcaaggctgtcctgcagctctctgttgcctcagcaatgtcaggacgactgtctctttcctaagtaacataattttaaagaacaatttgttcctcagggaataatgtcttggattgtggggaatcctattaaaagtacaactattgcagtcatttgcttttacttttaccagcctcactcataaaccctccatctgtttgttgctttaaatagaagcacattataagagattatcacttgatcaggctgcatgtctgagtgttgtgtgttttcacatactcatgtatactaaggaataaaagaaagcaaaccacagattctggatgaaaggatttttcatttgtttgtgtgtgtgtgtgtgtgtgtgtgcatgtgtgtgtttccagcggagatgtatcttgtacattttcaagggaaaaatgtctttcttgctgttttcaagaaataacctggctgtctttcttcttttctttgttaacatgcagaccaaaaacaatccacaggacccttttcatcaaaacaataatggtgtttagtacttgctacttgcaagggcagcctaaatcaggtctgtgtggctgcaacacaggtaatgcccagcgtggacacaatagtacccattgagactcttccctgctgtccatcattgtagctgatccaatgtgacctttgaccacttgcttcttccggttctgtttccaggaagaaaccttcactgaagaagggcgctaccattactcgattctctctaagttgttcaaataccatgcaggaaactgactgttatgagtaagacctggaaaggaaaatgacaccagagaagcacaaagaatgttgattacctgtttatatgacaactggaccatcggcttgtggtacagtgttgtgtattacttcttctaatgcatcagcaacccctcaaatgacccaaagaacattgaaagccacaaccactgttcaaaatattgtcttcctacaagtctacctgaaatttcccagcattgggagttcccatcctttgggtaattataatgctaagtgttaatttgtcactttgtggttgggataggtcataaattgtgttatttgtgcatattatcatataagcacatgctaattcttctagagtatcttggaatgtggcccagagaacaaccaacctgggacaagggaattttgctaagaaacagtaggggaaattctaagtatggaatgtgtatgggggagagttgctatagtaggaatgatataaatggcaataaatgggattatgccaagagacagaatgcagcagaattaaaatgtggcatcttcatggataggagtaagttgagaaggaaagggaaaagatagttttctgccagttaaaaggtttgctgatattcagcactacagtgatgtttagggatattttatcctcaaaattgagtcatctttcatgtaaatgagtgtccaccaatttaatgttttacaagattttctgcccaacacaatgaaacagtgtggaaaagatggttcatggagcactgtgggaacaaatgatcgtggtggctgcatatggacagagatgactgtggctggtacctaatattctacaaactcagcatcctaaggcaagtgcctcagctctggagtggctaaaaaatacaaggtaaacttatgatctgggcagtcatatgaaagagaaaatagttctgtggtcatgggaagtcttcgtatattcatcaagttcagaggtagatggacaccttgacaagataacataaaaaaaacaaaaatatttaaagaaaaagacgagtgcctgtatatggggcagaagatgctggcaataggatttaactgttattggcatgcaggcagcgaatgagaacttagctcataggaagtgtgaataacatcttagttcaagtggattacctggattaacatgcagaatattctagaaataatgtttatattttgtcacatcaattactttaagtcaacttttccttctttgtattggaatagttctctcaatgttataaataggaatgaattttaaaactctgggataatttcctttagacaggaactttccaatttaggtgtttgtgatgagagggaaaaagtcctgccagtgggcttaagcacaatatttaggctattctagttacagagtatcaaagtaggtaagaactaatgtatattatttatttacaaaggctaaatttaataaatcatagtctaaatcataataattaagtgctactataaaagaaatttcccttgaagcgagatagaaataaaatttaacacccaggtagagtatggtgttttaatttttatgttattactatttaaagtaatcttttatgaaaaaatgtactctgacttccaccccacattcagtttttcaggctgtgcttatgatagaaacagcgtttgggggcaaaatataacttaattagaataataacaatgacagctacgaagtcttctaaaatttttaactaattacttgggttattagacaaagagagagagagagagagaatgtgtatgagagagtttaggatctgagtagagaattcctattactgacatacgttttctaagttttgcatggactccaaaataggtcagtaattatcccattaccatgttacatagaaaaatgcatctatttcatacctgattaattaatatctactttgtgtcctcctttcctatgaattgctgatctacattttatgacatcagtcataaagtgctcaggctgtggtgtgacagtgtcatgatgtttttgtttttacccttcttggccttttaaacacaggatcattgttcagagggtcacttagagcaattttgttttaattaagagagatctttgatgctcaaagaaaaacagattacatgagttatctccaaaagttactgtatgaaaccaggtttcatttatagactgtccatattcccctatatttttacattcatacacaatagccatatttccttatttacatagaaaggttgtcttccccaaaataactctgttttctacagggctatagcacaacattcatattctgtagccacattggctacattctcaaacacaataaatgtccaaatgcctccagttagaacacttacctcccctcctcttttaaaaaacttcatttggtgtgctcactcagaatgatccattttcagaggatcacaatagagtataaaaatattgggacttaatggtcaacacattccttgaaggtctagaataaatgatgataatgaaggttactatcaccagaaaagggtcatatttcggtgtagatattttgttaagttaggtttaaccattgcttggaaaattacatttagctgaaaaaattaggatcgcaactctaatttattagataaatcttgcagatttatacttataaacatttgtgtatataatatagatatagggtattggtttatcaaatattaaaatggaatttacaattccattttggctagtttggcctatggaccactttagtggacaatattatgggcttctttgctctagttcattcatgatacacaaatgcacacactcataaacacataaataatggttactataattattttgcaatatcatcattaaaacaagcactaaaactgtcattttactaaaatgtgttggtcaagaaacaactagttgtagaagtatgtgctactggaagcatctgtttacttcatgcagatcagtaatataaatagatgaaatactcttaagaatacaaattggctataaatatttaaaaactctaacatttgccattacttctgatttgctcccaccacactgttgggtcacttctttagaaatattttccaagtaattcttggtttatatggtttacatggccctcttaggttttgaagctttttaaaaaacaatgctaatttgtatctgtaaggatgcgtatccatgcactcatttcacaaatattcattgggtacccttagtatgctagaaagttacaaatacaaggggataataagaggatgtcctgctttttgacaaatttctgtctggagtagactaatatatatacaaaaattattatatgctgggatagatattaagttagaaattgcactaaagaactacatgaattaaggcgctagaaatgatggtgggaagttaattccaaatgtagccataatccaaccatatctgcagttagcatcttgacccgagacaccaacatttcttaacctggattattgattacgtccacctccctaccaagtctcctgattgtactcttaactttgtacagcctattctttgcaggaaagccagtgtgatcccctaaaaatgctcagtcacatcctgtggttctactacccatttcccatcagcggtttcccatctcacttggagtaaaagttagagtcctttcaagaccctttatggccctacataattggttttagagaaatcagggaatcagtgacccaatagctgtgagagtgaaacagaaataaatgcccacaccacccctcactgctctccactccagtcacactggactacaaggagcacattgtggctctaggactttgcccttgctgttccctctgactgtaatgttcttcccctagacaaccccatgaagtgccacttcaattcattcagatttttgctcaaacgcaacctcactagagaggccttcttggaccacccacccacttatcacactctacttactttgctttgtttttctctgttgcacttaccactgcttcacatattagatatttatttgctttttcatttattattcaaacaaaggggtgccttgagggtgccttgacatatagcaggccctcaataaataatcattttatgaatgaatgaaagaatggttctaattcacagaggtctattaggctgtgtttacaaacatattgttgcatattgagcaagatgagtctcttttatcaaatgagttttcaatggaaagttttctgctcctttctttaacctaaatcaggcaaacaaatacttcattccattccagaacaatgtacaatgaggaagcgtgagacaatgaaaatgggttaagattgaaacaggaaagaaaatgaatgtcaagaagtagaatgactagatgatatgcaacatgacattggatggatttgaaatgcagtgtaagctttacagggttgcttttccaattatttcccatgcaaccagcaggctgtgtggaattggttgtggacactataagtaatatagatcagagattatatttgtagaagcagaagctcttttcactcaattaaaaattaatcaaacatgtaaattctttattataactcttttacaccattttactgataagatatacacaaagcaagatttaaggagaaatctaaaggaagcataatattatttataaactcttcttagacattattaaattatggttttatctcaagatatgaatagaactagctcattttaagttggtaacttagcatccagactttctcaaaacttctgatttgataatcagaagtaagataatgaaatttttttcctgcactgtgggaacagaatttattagtctaattaagtaatgataattttatgcaaatgctgttataaactcattacaggcattaactaatttacttatcctacagctccatgaaataagtgctattattgtctccattttaaagataagaaaactaaggccttgaaaggctcaataccatggaccgaatacacacaggagtagatgtgaaagccggatcttagctcaggctgtctgggcccagagttgatactctctatcattgtaatatctctatgacagccatcccttatttgtaaagctgcatatttttctgatgatggagatagtgcgcatgatatttttgaagcttctttggtggaacaactctttaaaactcagtcattcataaaatgaggattcgtgttaacaaaagggaaaaaatggtgttatataactctacaaccccaatcattccctgaaatcagtgccaaaaaacaaacaaacaaaataagcaaaaacaacatactttgtataaatccaagctactcccaaatgaaaaatattttctgatgtttaagacttttgaagattttctatgaacacatagtgtgatgaaagaatcaataacttggaaatctgacatcctgatcttgatttctgctatttggtcaatgggcaatcattagttatgttgtaagatggaaaaactccatcttagtggatggtccagcagagccaatagagcttggctctctttctgctctgcttctccctgactatactcatctctctggtcttcaaattctgtgctgtttaagaaggataggaagcctgtccaaaggcagataacaccattgaggataatcaccaatgtctctccaaacttggagtttagtaacttgtgagatataatgcatatgaaagtgctctgcaaaacaaagtgctacccaagcataaatgattatatggtagaatgcaaactctgaaggcatttttgaaaaggaagttttagaaatattttaggtgatcagattccttcttggaattagggcatagtctctcaagatgactactttgaagcagatcagaccacaacattttgcatcattcctggaggggggattctaaaattagtcaccattttatagctaagtcttatatactcggttatatatgcgttagtggtgtttagacttcatgcgtggtatttttcatatgccatgttttcatttggtgataatcattcatggctttttccctactttatgtattcctcataattagaaagtatgaatttaaaacttcttctggcttctatttattcattagggccagattagggtaaggtgagtgaggcagtcaccttgggagcaattgtaagatgctacaaatctcactaaccaggatactaatgttttaataaaatatttttaaagcccaaattaatgcatataattaatgatgaacaaaatatcaaatgttaaataaaaacttttccttttgccccaggctccatccactatgagtcaacacagcaccatattcacctgttcaattctatccttaaaaagcatcaaagtcggccgggcacggtggctcacacctgtaatcccagcactttgggagttcaaggcgggtggatcacgaggtcaggagatcgagaccatcctggctaacacagtgaaaccccgtctctacttaaaatacaaaaaattagctgggcgtggtggcgggcgcctgtagttccagttactcgggaggctgaggcaggagaatggcgtgaacccgggaggcggagcttgcagtgagccgagatcgcgccactgcactccagtctgggcgacagagcgagactctgtctcaaaaataaacaaacaaaacaaaacaaaaccatcaaagtcaacaatcccaccttctctctcccactttccatatgttagtttctacttgtgtgctaaaaatatcagcatattttcatgataatcactcagaattcttcctttgccttcttgctcccaacttgttttatgtgtacttatctcgctgaagggtcagaaagatcctatcttccttgctctatgtctgactttagtgctgtttccaagtttggccattcattctcatttggttttagtaatttttcagacattcctcttgacctattgggccttgacacttttactcagactttcctcaatctttagatgtccccggttgcctggggtaagaaactctgtgtcaagccactgtaagcccaaccctgactgggccaaaccccttgtggaaaaatgggggaaatttgaacattacttatttgatggatatttaaaaatccttgggcctgtcaacactcaacattggcttaatttacagctaaaaatcttaaactgtggtttgtagctagcttctttactgaagactaagccttcgccttaaccatctgtgatggtttctcttatctttgtatttttcccatttagctattaaagcaactttcaatggtttttacttcttctcttggacattgttttcttcttctacacagtttggcagacaactgacagagactgatgccttctattcatcaatccctgcatatgaaaagaatgagttccatgtttgtctagcagtctttctccccaccttagaagaactggcaaatagtgtgtgtatatgtgtttttttttttaaatagactttattttttagagcagttttaggttacagcaaaattcagcagaagacagagattcccatatcccttctttttatacaaatggatgcctatgcaatgcccacatcttctttttttcccttaccccctaaagaacaaagatggataacataatattgctagaagacatactaaaccaaaaagatattatgattatgaatgcatatacatctatcaatgtaggctcaaatatgtataaaacaactggtagaacagtgtggagaaaaagaaaactaagcaattttagttggaagtttgtagacattcattatgcagagtgttccaaaatcttactgacattttacgctttcatgactctaccttcaaatgctacaaaattacaaaaatatcatttgatcatataattatttacactgctcttccacttactttgtggtttttggaaagtaaatttttaatgttaatttcttgcgtgccctggtttctgaatgacattttctcagaggatgagccagtgaaggaagacccgttgctgtgcctaggtcacctggtctgtgtctactcaacttttctgcatggggtcatgtccaaagtttctgtcatgtgttcactgaaacctcattcttttttttttttttttttttgagatggactctctctgtcgcccaagatggagtgcagtggtgcagtctcaactcactgcaacttccacctcctgagttcaagcaattctcctgcctcagcctcctgagtagctgggattacagatgagcaccatcacacctggctaatttttgtatttttagtagagacggggtttcaccatattggccaggctggtctcgaactcctgacctcaagtgatccacccacctcagtccccaaagtgctgggattacaggcatgagccactgtgcgtggctgaaacttcattctttggagggtcttgaggccaggattgtacatgcaattattcttataattgagcagcagctgaggaaagttttaatgaagtttgaaaatcaactagagtgatgtgtagcagaaggccacgcttatgttgaattttaataagaaacatatcaatattttaaaatataagaagttaacttttcaaatatatttgatgtaagttagtagcacttagactttgaaatgattaaggtttaaaagtgcacctagactgttggggcttcctgaataatctggatactaaatctccactttaatgtgtgagcaaatattttctgcatgactgtggtttaccttttaaggttatttattgtcttttgggggatatttacaattttgatgtgatcaaatttttaaatttttatcatacatgtatgaggaaggtgcagggactgatgtctttggaaattcttcagtatattgaaatcataaagttattttatattttcttctaagagctgtgaaattcttttcctgcatacttaggtgtttgatccacctggaacttacttatggtgtgatgtggggatagaagtaaacttcttgactacataatagtctgttgttctactaatcttttctctccttttcaatgcaatttctgtcattgtcaagtttatgtatatatgtggaatgatttctggcctctctgttatactcaatttgcataatttttttcttgtgccaatattaccctattctaattgctataaccgtataattttcttcctccctctcccctctcttcttcatttcctgcttccttccttccatttttagttggtatataggtcttcttctgactgaatcataagaattctttctatattcttaatgtaagtctttgtcagatgtatgtattgcaaatattccctcctgattggaggtctgtctttttaatttcttaacagagtctttcaaagagcagagattcttctcccattctagaaatttctcttgtttaaaaaaagttctaattttgaaataatttcaggtttacaaaaatgttgccaaaaatagtgcaaagtttctttatacctttaatccaacttcccaaaatattaacatcttaaacctgaaacaattatcaaaattagaaaattaatattgaataatattcttaatctatagaacttactcaaatatattgactggcctactagtgcttttttgctaatccatgatccagcagtttatcagaagttcactaatttttcttatcttttctgagaaccaggttttcatttcactcattttttctctcttgtgtttttactattttattaatttcagttcttattttgtatttcctccctttcacttgctttgagtaacttttcctagtttgctagtagaactttaaaaattcattactatactgtcttctaatataagcatttaaagcaataaatttctttctaaatattgctttagctttctctaacgcattttgatatataataatttctatgttattctgttgaaaatatttaataatatcctttgcgatgtctactttgatatatggattatttagaagtgtcttgcttaatttccaaacatttgagagctgtccagatttgagagggaggggtgcggtatttatttcctattaaattagtgtttgtgtggtgagagaatgtactctgtatgattttgatctttctagatgtgtgagtttagcttacaatttagcttgatgaatgtttaatgtgccctggaaaagcatgtgtatactgtcattgttgggtatattgtcctataagtgtcaactaacaaaagttggtttttacttttgttcaagtttttgtatgtccttattgactctatgtatacattttgattaattactaagagatgtgtgtcaaaatttcggactgtagttctgaattttttaattttttcatttagtctataagtttcagctttatgtatttttaggctttgttgttagatgccacttatacatttagtattattatatattattgatgcatttgtcattttaaaatatgaaatgtccttccatatttcaagtaatttttcccattctgaaatctacatgtttattaatataactcttttagagttcataggatttattcttttccatccttttacctttaacctattttcatatttcttttcttaattttttttttattagagtcagagtcttgttgtgttgcccgggctggtcttaaactcctgggcccaagcaatctgcccaccttggcctcttaaagtgctgggattacaagtgtgagccactgcacccagccctatcttcatatttaatattgtcttcctatttatagcatgtagctgcttttcctttaaaaaattcgtctgaacaatctctaccttcaaatggagggtttagaccatttgcatgtaataaaattattaacatttgggtttaattccaccatctagctgtttgtgttctattcatcctgtctggttcctattcttatgtcttatttttctagcttcctgttgattaatttagttgttttagtattccagtttacctattttggtatgtgtggttgctctagggtttacaatatgcacttttaacatatcacatcaatatctttaattaaaatccacttcccatgcattgtactgctgtacaacaaggatgcttccattttccctaacatcctctatgctattactgtcctctatttcatttctacatgcttataaaatgcataatatatgtttattatttaaactgctaagtatctgctaactaaatttttaaaataaggaaaaaggtttacacacacacacacacacacacacacacacacacatttttctagttcccatagttaccatttccaatattcatttctttgtgtaaatctgagttttcattttggaagcattgttctttagcatgaaaattttcctttaacattttttagggtggttttgcttgtaataaattctctcagcttttgcttgcttagaaattaccttatttcaccttcacttttgaaggatgttttcactggagatagagttttaggttgacacttttttcttttaagcacattaaatatgtcatttcactatgttctgtcttgcatcatttctgatttgtggtcattctaatctcctttcactgttcagaatgtggctattctttttctggcagtatttaagattttctctttatccctggttttcagcaattcgattattgtgtgccatggtgtggtttccttttgtttattctgtttggggtttgttgagtttctcaaatctgttggtttatagttctcattaaatttggaaacttttagctgtgtttttcatttttataaattagaatttttttctcagatttgcctttttaaaaaattttctttcaacttgatttattacctgtttacttctcctgtttattgtgcctgatgaatctcattatgttgctgttactgttgcaatttcttctccctcttgtcctcttcctattcttctttttgagagttgttttccaagacagtatttgatgctctatgctattgaggtagctctattgggcaacttaaaatgtacttttcctaagaccctgtaggcattaccaatactagaccagctattatattcattttctgcttataagtccttccctaggagtggggtaaaaatgtaaactccatatctcccactgcatagacttgggcttccaatgtcttatagatgaatcttttatcatatattgctcagactggttacttggattcgaagctgcatcctaccaggcacagagtattattcaggggatcagtttcagttcattgtgcttaagggtgaggatcctaaaactcctctcctaggcatttatgcttatatccacatctgatttccctgcaggccacttgccttgtatttttggatcccactgtgactctgggtttcctttttatttttgaatggtgcagattttcctttcttactttgaagctcaagtgtatgtgtgtgtgtgtgtgtgtttaaatatgtaaaatatttgccgtcataggagtttacttcaaaaactatactaactgaaattctaatatgaattcttcattcttaaatatgaatgggaaaaccaagaatcactaaatatttgaaggataaaatatgacatgaggttaattctaaggcaaaaaaaagagaaaaatagtgatgccaaaggaaatagagatattcaagaagaatagaggggcaacacctttattaatatcctctgagacatgtgggctaacatttcatccacaaagtaataggatacaatgaaaagggaagagtcagagaataagaatgagatcttgatgagcaaaatattatggacaaaatgaaacagtctgtagaagaattagaagtaacacataaaggagacaaacatgaaaatatgagagacaaggtaagtgacagaagaccaatgcaggagctctaatagtcaattgatagaagttacacaaagaaaagaaagaaaatgaatgaaagaaaatgttcaaataaatcatgggacacagttttgaagagctgaaggccatcaaatattcgacatgataaatataaataaaaggaaaaaataattgtgattttagaacattaaggtaaataactgaaagctttctgagaatgaaaaactgataaatcagataaatatagtacctctgtaggactgacctgttattgtgatgccagatgatggtatagaaatgctttcaaagttctgatgaaaatgatttcaacttgaaattctatactttggcaaaatatgaaataaatgtgagacgaaagtaaatatattttcagacatgaaagagttagaaatctattccccagaatgatccatcttttctcatgctcagcaatagaaaacaatttttactgagacacatcccagctagctaaatattatatttttctgcctctcttgcagctatgagtggctacataaccatgttcttgccaattatttgtagtggatgtgttgtgaggggggcttcttggaaatatctttaaaaggaactgatagtctcctattattattctttctaatttcctgaaatgtagacatggtaactggggctctgacattcattttggtccatagtttccatgagaatgaaagccataggcagagaataattttttaaaaagttaaaaaaaactacattcctatgacaatatgaatccaccatatcaagtttgtactgcctaccttcaaatttctttttgtgatagaaaaaaatatatatattttatttaagttacatttattttttattcttataggcagctgaacctaatccaaactgacacagaaagctatttgaggatatttattaattactgagtaattttattttatttttgcattcacctggccaaatgacgatggtctgggcaataatctgtagtggaagtatggagacttccacttcatacttgtacagaggcttcaaagtaccagtggatttaacctaagagagttgtcaaaagaaaaaccaggaggatttctgtgtaaaatcttaaggaagatgataaaaacatatttcaaaagtaaaataaaagcaactggaaactccaagggaaacataaggcacttaaaaatgctatcactttgttctaaaattagcaatagttacaaaatcaaactcatttaagcaataataagcatccttcagaggggaagctttcttccaaaaattatcagtgtttgcttctcctaggaatttttattcaaactaagacaattacttaaaaacttcaatttcttcaggatttatttaagtgttgccctctttacatgaatttacctggtatgtggtgagttctttgtaggctcactcttattcaccttaggaaagtttcttattatacctgtgattgtcatatatattccaacagtaattttattttattttattttaaattctgggatacacgtgcagcatgtgcaggtttgttacaaaggtaaacgtgtgccatattggtttgctgcacctatcaacccatcacctgggtattaagcctcacatgcattagctatttatcctgatgctctccctcaccccactgctccaacaagccccagtgtgtgttgttcccctccctgtgtcaatgtgctcacattgttcagctcccacttataagtgagaacatttggtgtttggttttctatttctgtgttagtttgctgagaatacttgcttctagctccatccatgtccctacaaaggacctgatctcgttcctttttatggctgcatagtattccatggtgtatatgtaccacattttctttatctaatctattgttgatgggcatttgggtggattccatgtctttgctattgtgaataatgttgcagcaaacatacgtgtgcatatatccttataacagaatgatttatcttcctttgggtatatacccagtaattagattgctgggtcaaatatagtgtttctggttctaagtcttttaggaattgccacactgtcttccacaatggttgaactaatttacactcccaccaacagtgtaaaagcattcctctttctccacagccttgctagcatctgttgtttcttgactttttaaacaatcgccattctgactggcatcagatgatatctcattgtggttttgatttgcattgctctaatgatcagtgatattgagcttttttttgtttgttggccacataaatgtcttcttttcagaaatgtctgttcatgtcctttgtccactttttaatgggtttgttacattccaccaattcttcaggaataccaattatagcatcttgcaaacctcaataataacactaatggtcctttattttatttgtttacctaatttttgtctttctcattagactgtgacttgttgattgtataaacagtattttttacttctgtattcccagaacatagtccagcattaggcatatcacaggtactcatgtttattaaatgaattaatgtgacaaaacttcatacaatacatacaagaacctgttccccttttgctgtttcttcaaggaagaagaaaaagaaaacagtgaaagaatttgtgattgaggaggagaatactgaacacactgaacagacttaaccttctccaaagcacttatgcagtagcacgcgtaccctcagagcatgtctcatgatattccagggcctcttttcacagatcaccttgcaatcccaggtcacaaggtgggagctgccagcagtcctggtatgaaaccacggcaccagcttccagtccttcattaagtgaggtggcttgtgatggactagcctagggtaattgtgccaagctaccgctgccctgtccctgccttcctgccaaacagactcagacatcaagtgagtagtttcacaagcctgcaaggaatggatatttataaagacaagttatgttgtggtcatgttcacatagcatcactgtcagctcagcatgcaggcaaactagagccatcttctctgtgaacaacaagcagctttactgaatgcagagctctaggaagggaaacacatgaaatgaggtataggggagtccaacgaacttgtccatatggaagtccacaacctttcttcttttcacatgggccctttgccagaggcatttgacacgtggtagaaaggtcatgtgacttaattaatagaccttgtttctggttcaggttctgctacttactggctttgtgtccttgaacatgtccttccctatttctgggccttagttttctcatttggaaaatttcaacttcatagatttgttttgaaggttataaaaatataatgaatggaagcatcttttataaaaattttaaaaaattgctcttttttaaactgggaaatgcctcagggctgttcagtctattgtgttcagcctttttatgtaaagaattgttaaagagaaatgttaccaaatcaggaaaaattacttgcatcgataaacagtattaaagaaaaacaactttgctaatatttaacatctttgtttattaatccactagtcaaatactattgagcatatcatcaccatcatcaagaatatttgagaatctactattcaattgttcagtaaacatttctcaagtgctcaagtgaaaggcagtagttgagccctcatgagtgaattcataaatcaaaaggagaagagaatccacaggaggaatgaggctggcataataattcaaggctcttctggataaggttcttattagtaatttctaaaatcagagatatcagac

SEQ ID NO: 5675 - DNA, 144541 bp, Homo sapiens
  LOC387700 gene - 91180753 - 91285293 of chr10; NCBI Entrez Gene ID: 387700; Build 35; sequence includes 20,000 bases upstream of initiation codon and 20,000 bases downstream of termination codon of the gene
atatacgtatatacatacatacgtatatatacacatatatacatatatatacgtatatacgtatatatacgtatatatacacatatatatattatcctttctgtagaaataaacatgaaacccaaaagcctaactgtgtttgtacccagcacgtgttaatagaaagtttaaacaacaaaacatttaaaccaatgcaatttaagctcattatccctgtctattgggtaacataagacaaaattatattgtaggtaactgtgcctgcgtgcctgtagtgcctgctactcaacaggttgagtagcaggaggattgcttgagcccaagaatttgagttcagcctcagcaatatagcaagatccactatcttgaaaaaaaaaagaagatattgtgtcctcttaaatactaatttgctttgttaatcacgatgggccctttccaaaggtaattgctaatcctgaagacttcattctacaaatatttactggatgctttctaggtgctaggggcttatctgggtgctagaaatttaagtgaggaagacagacaagggttaggtatggacaaccagtgtttctactgggggatattctgccaggacaggggtaggaaaatacctgcttgcggagcctcaacacccttggaatattatcttagaaatgtttagctttatgaagatgaaaggggacttagacattatctagtggaaattcagatggctagagggctagaggggccagatagctaacataaataagtaaagtaggccagctggggcctgctgttgagcaaagagcaggtatccaatgtaaaggttgctcccatctcatcagctcaggctacagttttcttctttctctctctctaacaaccaaaagtaagaccgtttccccacaacacacacatacatatgtcatctaaaagtcaacaaacagaaagagcagctctgggaaaggtggattcagaggtggcaaagcaaacactttgtcctccatctccccacaacctcaaatattttaaaaaacaaacctgttcaacccaaattgtgataaatattaaacaacacaagataataacatgatcaacaactaaagtgatgatgtagatgaggtctcctgtcctgtttcctcaaaaggttttctcggccattaaaagagcttccctctctagatctggttcctttaaatctcctggtagatttcaccagaagcagggtcttcaggtgctatcagaagggaattgaggtgggttagttatgccttcctggcttctcatttgtgaatgtgagaagaatgtgcaactgaggcaggcactctctgaggccagatttttctagggaagtcaggtgttgatttttcaagagaagccagaaatctggagttttttgagaactttcccattttctttctttctttccttccttccttccttccttccttccttccttccttccttccttctttctttctttctttctttctttctttctttctttctttctttctttctttctttctttctttcttcctttctctctttctttctctctttctttctttctttttgagatggagtctcgctctgttgcccaggctggagtgcagtggcatgatcttgactcactgcaacttctgcctcccgggttcaagctattctctgcctcagcctcccaagtagctgcgattacaggcacctgccaccacgcctggctaattgttttgtatttttagtagagacagggtttcactgtgttggccaggctggtcttgaactcctgacctcctggtccacccaaagtgctgagattacaggcgtgagccaccgcacctggccaatttgtgataattttcaaagtgctgtgagggccaatccaagctgatctgagaattaaatttgtcccattgttgagcagttcactccctaacctaatgcaatcgcctaattttacagataaggtaatgactcagagcagctaacaacttgtccaatattgtcacaaagtctgcattcttttcattgagtcatcaagtagctacaaaatgtggagaaaatgcctgcgaactattaagacaactactgtcaactttaaacaatttagtattgaaatgagtcatgctagttggcaatatttgtgctgagatgatttaatagcctgtgatttatatgaacaaagagtgtagtacctaatgtgcaaaatgttgattgtcagagaggggctaatgagaagacaaaaaatgtaccactctgactgtaatggattacaagatggtgctatcaaaggtgaataagtaactataaacacaacagtctactggaaaacagctgcagggtaacaccacaagaaattctgagcaagtcagacattctgttatttcccaaatctaataaaagatatgcatacggattttactattaaattaagaaaaaatgattcaatatcacagaaaacataataggcatgcgggtgtggtgaaggagtagagacggggtttcaccctattggccaggctggtctcaaactcctgaccttgtgatccacccacctcagcctcccaaagtggacagagggacggaggtacattcaagagaattcagctggggcttcaaattctgagtccaatgcatttcaatggtcattttttggaacttgggaataaaaacattttggtagcatttaagaaagtaccatttctttgattgttcattacacgtggctaattccggtgtaaaactgacactccgagaggaaagccaagtgcggatgtcaccatctggttttgctaagtcttagttcgcatctcacttactctctccagattctgttagggcagggccgattatccattttgttcattatcatactcccaacttacttcctggcactcagaaggctctcaataactgtttagttgagttgaattggcttagctggaattgaagagccagaagcaattggaagggaccttagagctaattctcatcatccacaatcactcacacccctcctagtaccatacgtttccccctctcacacgtccacctcaattcatggagaaatgcaatgtgctgttgtgccatagtcagcaagcagccaaatctaattcagtgctaccaccctagattctctccagatgatgcctaactccaaaatagattgtcataatgttcttggccagaagcctataatttttaaatgagattacatgggatttatttaagctttaatataactataataagtattaataacacatgctttataatctgttttctgtttcttgtgatatctttgtacttacaaatcaacattaatacatctctctttggccaggcgtgagtggctcacgcctgtaatcccaggactttgggaggccaaggtgggaagatcaaaaggtcaggagttcaagaccagcccggccaatatggtgaaaccctgtctctactaaaaatacaaaaattagccaggtgtagtggcacgcacctgtagtcctagctactcaggaggctgaggcaggagaatcacttgaacctgggaagtggaggttgcagtgagctgagatcacaccactgcgctccagcctggacgacagggcgagactctgtctcaaaaaattaaaaataaataaataaatagatctctcttcaaaagggcaaaacaaccttttagcttttgtattagtttgttttcatgctgctgataaagacatacctgagactgagaagaaaaagaagtttaattggacttacagttccacatggctgaggatgcctcagaatcatggcagaaggcaaaaggcacttcttacatggtggtggccagagaaaatgaagaagatgcaaaagcagaaacccctgataaaaccatcagatctcttaagacttattcactactatgagaacattatgggggaaaacacccccatgattcaaatgatcttccactgggtcctcccacaacacatgggaattatgggagtacaattcaagatgagatttgggtggggacacagagccaaactatatcagctttatggaagtttcccaacaacaatgtgctccatcagcactgggttggaagaacaatgaacttgggactttttatttatttatttatttagagacagggtctcactctattgcccaggctggagtgcagtagtgtgatctcagctcactgcaacctccccctcccaagttcaagcaattctcatgcctcagcctcccaagtagctgggactacaaacatgcaccatcctacctagctaatttttagtatttttagtaaagatagggtttcaccatgttggccaggctggtctcgaactcctgacctcaagtgatctgccttccttggcctcccaaattgttaggattacaagcgtgagccaccacgccaggctgaacttggggatttttgatcaccggtcaccagtataactctggaacagagtttaattccagaatacacaccctcactccatccaaaatggacctttctaacttgattacatcatggacttccacaccttgaaaactttggatccttttattcattcctccaataattgaattcctaatatatgccaggtaacttacaaggtgctggagatacaatggtaaacatgatggacatcttcttggtttcactaagcttttagtttagtgacacacaaaatcaatgcaaacagcaacaacaacaacaaaatgcaattaacattagacccctgggggaggtgacatttaagctgagaactttgcgaaaatagtgaagagctttctaggcaggaggaaaggcaagcacaaagccttctgcatccctggcttggtgcccagagaaaagccaacatagctaagtatagcgagatatgggagtgtggcacgagatgatgtagagaaaggcgggggtggggccatgacacattatgggccatggtcagaggagtttagattttgttttagtgctttgggaactactgaaaagttttaagctgcaaagcaatatggtctaattttgatgttgttgttgttgtttgtttgttttgagacggagtcttgctgtatagcccaggctggagtgcagtggcgcgatctcagctcactgcaacctccgcctcccggattcaagtgattctcctgtctcagcctcccaagtagctgggattacaggcacctgccaccacacccgtctaatttttgtatttttagtagagacggggtttcaccatgttggccaggctggtcacgaacacctgacctcttgatcctcctgcctcggccccgcaaagtgctgagattacaggtgtgagccaccgtgctaatttaagttttaagaaaaacattcttgatgttttatggagaatagatgggaagaggctaagagcagagggaaggagatcagttaggagacttgcactagtgggagagaggagatggcaagatggatcaggatgttgtcacagtgcagatggaaaaaaaggggtggatattgatgagacaattgacaggacttgttgatggattgatatgggaggtaagtgatgactcctagatttttggcttgacgaatggaatgaatgaaagtccaatataataaaaccataaagtagagttctctgcttaaagagggagaaaggaaagagggaaggctgggtctgaggcactttactcccttccagctaccctgggtcttcctagacttcttaggtcatggctctcaaattttaggatgctgagccacttgcaaagcttgttacaatgctggctgctgaatataatgttcctggagcagagcatgtggggcagatgtagaccagaatggctaataaaggtgtgtctggtgactaaagaattatagacacactgctttcagctaaccttagaattaggtggaaacgccctaaagcaattggcaagcagttagctgacagagtatggcttctttttataaacttaaaaaaaaacccaaaacactaaggtgactttttcttttcactttatgcttctccattcttcacacactactgaaaaaaacaaaaacaaaaactgatgcctattatttatattgctagaaactctaagtagttctccctgttgttaggatgaattgtaatttcttaataatcttactacagcatcatctataaccacaaaagctaattaatatgaatgtgtaaatgtgtctctgctgaaggaagcagcacaatagtgcactgtatatataattggtatagcacttgaggtgtacacttactgcaaagaaactgaaactggatttagccattgttcctttatctggatgccttatgtgtattggttttatcctgatcaaatattccttcaatttgcactttctgaatttatcaaaatgaataaaggtgaagcagaaacttgctaattaattcataaagaagatcaacacagagagtcagaaagggtaaatcagccccaaacaaagctggctatgcctgtttttcaaataagtttaatcagtcttctctggtgtttctgttgttagcaggtgacagtccagcagaaccatccatctcattcaatgatttgcaaaagctgcctgatcctgctgcgagcaggtcctgctcattatcactcattcctctcttgaaagacagcatttcccctctgctggtgtacatccctctccactctctaaattgcatatcacacttgtgcaattcctgtggcacttgctacatcctgcttagcaatcagttagtgcgtcttttttttgagacagagtctcgctctgtcacccaggttggagtgcaggggtgcgatctcagctcattgcaacctctgcctcccggattcaagcgattctcctgcctcagcttccctagtagctgggattacagatggctggcactgcacccggctaatttttgtatttttagtagagatggggtttcaccatgttggccaggctggtctcgaactcctgacctccagtgatccacccgcctcagcctcccaaagtctgggattacaggcatgagccactctgcccagtcgcgactgcgttttttttttatttctcctactagacattgcaggcattccccaaggtctggtcctcggcctgctgctctggcttcatccaacctcttttgcacagaacattttcaaagcatacctctaaccttgactcttccccttggctcctgacctgaattttcaacagtttgctgggtacttcacttccagctcaagatccatgtgttcaatattgaacagttcacatgctgctaccttttctttctctgttaatgatcaccatcctcctggctggagacacacagacttctcatgtctctttcacttcatatctaatcagtcactttgtcctattgattttctccattctcatcaatggagaatacactgacaaatacaccttgcacttttccactgcaagtattagtacctgcattagtacctgcagtttgatttaacaagactgccttccttcctgctttttgaaattctccaagaaggtgttccagccctacctataatgtcacgctccaccttgccagcttctctctcaagcagtccacttttttttttttttttttttttgcccaggctggagtgcagtggcttgatctaggctcactgcaacctctgcctcctgggttaaagtgattctcctgcctcagcctcctgagcacctgggattacaggcacatgccaccatgcctggctaatttttgtattttttgtagagatggggttttgccaggctggtcttgaacttctgacctcaggtgatctgcccacctcagcctcccaaagtgctgggattacaggcatgagccactgtgcctggcctccacctcttctctgaattcttctagcaagtgttgacttcctttatcaaaataatcatgtacccttttcttttgaaacaaaatgatcacataccttttcttattataaggttgtagtaaaggtgtttttgaaatatttgtcatttgcatggctacttatagttccaactagattgtaaattctgtgaaggcaggaaccatgtcttaaaacaccaatgtactatgcacagggcctatacagactagatactcaggaattctggttgatttatttgtactggatttagctagtatagagatgatagagagccatgcactgtagttcagtttgcaatttagtcattcattaaattggctcattaaacacaaataatttcttttctaatatattgctaataaaatgtttttttcctcaagtaattgaaaagattgtaatagtatgataaaaactatacaaaagacttctgataatgtgtttgcaaaaacttttttcccttatactcttataaggcatattcaaggtctgtaggcagcatgaatttttttaaattcattcttctaaaaaaaatggggatacatgtgcagaacgtacaggtttgttacatagatacatgtgtgccatggtggtttgctgcacctattgaccagtcctctaagttccctcccttcacctcccaaccccccaacaggctctggtgtgtgttgttcccctccctgtgtccatgtgttctcactgttcaacttccacttatgagggagaatatgcggtgtttggtttgctgttcttgtgttagtttgttggggatgatggtttccagctttatccatgtccctgcaaaaaacattatctcattcctttttatggctgcatagtattccatggtgtatatgtaccacattttctttatccagtctatcattgatgggcatttgggttgatttcatgtctttgctattgtaaatagtgctgcaataaacatatgtgtgcatgtgtctttatagtataatgattaatattcctttgggtatatacccagtaatgggattgctgggtcaaatgatatttctggttctagatccttgaggaatcgcgatactatcttccacagtggttgaactaatttacattcccaccaacagtgtaaaagtgttcctatttctccacagcctcgccagcatctattgtttcctgactttttaataatcgccattctgactggcatgaaatggtatctcattgtggttttgatttgcatttctctgatgatcagtgatgttgagcttttttcatatgtttattggccacataaatgtcttcttttgagaattgtctgtccatatcctttgctcactttttgatggtgttgttttttttcttgtaaacttaatttccttgtagatgctggatattaggcctttgtcagatgggtagattgcaaaaattttctcccattctgtaggttgcctgttccctctgatgatatttcttttgctgtgcagaagctctttagtttaattagatcccatttgtctattttggcttttgttactattgcttttggcatttttgtcatgaagtctttgcccatgcctgtgtcctgaatggtactgcctaggttttcttctagggtttttatggttttgggttttacagttaagtctttaatccatcttgagttaatttttgtataagatgtaaggaacgggtccagtttcagttttctgcgtatggctagccagttttcccagcaccatttactaccgaataggagattgtttccccattgcttctttttgtccagtttgttgtagatgtgtggtgttatttctgaggtctctgttctgctccattggtctatatgtctgttttggtaccagtaccatgctgttttggttactgtagccttgtagtatagtttgaagtcaggtagtatgactttgctctttttgcttatgattgtcttggctatgtgaggttttctttgattccatatgaaattcaaaatagttttacctaattctgtgaagaatgtcaatggtagtttgatgggaatagcattgaatctataaattactttgggcagtatggccattttcacaatattgattcttcctatccatgaggatggaatgtttttccatttgtttgggtcctctcttattttcctgagcagtggtttgtagttctccttgaagaggtctttcacattagctatattcctaggtattttattctctttgtagcaattgtgaatgggagttcattcatgatttgactctctgcttgtctactgttggtgtaaagaaatgcttgtgatttttgcacactgattttgtatcctgagactttgctgaagttgcttatcagtttaaggagtttgttgtgtgaatttatattagttatttcttgattaaataatgctgcatgacaatcatcatacctcagtggctatgatgataaacatttttgtttgtgcatgagtgtgtaagttacctgggtggttctgctgatctcagctggtctcagtaggctcacttgtgcacctgcagcctgctgaggggatagctttgctggtcttggctgggctcaactggggtgactcaggttggccccaaatgtcctctcatccagcaggccatttgaggcttgttctcatagcagtgcaggatttgagagagagccagatggaggtataaccccttaaggtctagactcagaattggcccactatcatttctcttccctattggctaaagcaatcataagatgatgcctgacttaaggagtatggagataggcctggttctttgtggaatgagctacaaagtcatattgcaaaggatatgaaaacaggggtggtagagaaaaccccagctatttttacaatcaatctaccccagagttagacagacctggtttcataaacagacactgtttactacttgcctgatattgggcaattcacttaaccactctgagccattttttctcaattggaaacaggtattatgagaacggaatgaaataatacatacacagggcctggtatatcataggaactaaaaaatttcaataaatttcctcacaaccttctctccaaagaattgctcttaatattatgaaaattaaataattgtatttaaatttaatttggagaaacagaatattaaaactgaatacatacttcagaaaataatgagataaaagtttgaacagtcatttgaaaagattttgaataaattaactggaaaaccaagttcaacattattaaaaccagtagatcgaactgatccaatgggatccaaaaagggtaggtcataaagtctgtgggtcagaccatggggaatgtatcacctccttttcttcatactccacatctggttgggagacagcaccagtaactcttctcttttgtctattctccacttaaacatatacttctactccaaatatattctcagaagaagccttagacggtcagagaaccaccaacctgcacagcagcactcagctagagaaacttgatttcagggataaagtattgggttaggtgtggggccataatggttctgctcatggctgctcctttgttcatagtagatgcttcagaaataccaactgaatgagtctcccagaggaagagcaacagaggtaaacaacaaaggtgttatacggtgaacatttactcattctacaaagctcaagtttctactctgtggacatagtgggaatggtaaatgagacagagttactgccgtcaaatagcttacactctaggcattcaagggaggagcatttgtattttctgctgacacatattgggcacttactaggcttcagctattgtgctaagcactttatccatttatccattttttttttgacaaggtcttgctgtgttgcccaggctggagtgcagtgacacaatcatcattcattgcagccttgaccttctgggctcaagtgatcctcccacctcagcctcccaagtagctgggtccacaggcatgtgccaccatgcctagctaagtttttaacttttttttttggtagagacaggttttcaccatattgcctaggctgatctcaaactcttgggctgaagcaatcctcctgtcttggcctgccaaagtgctgggtttacaggtatgagccactgcacccagccagctaagcacttttataagtacaaatctcaattagcctccacaacacctatgaagtgttattattatgttcattttataaatgaggaaaatgaagttctgagttattatacaacttgccccaaatcacccagctagcaagagggggagctaagccgtgaattcaaatctgtctgatgtataaacttgggttcttaatgactatcactagagttggatgggaaggctttgtgaataaactgggatgtttgttttatttttaagttttaaattatttttattttattatgacaatttgaaacagaaaaaaagtcaaaaagattatccagtgaacacctatatgtttctacctagattctagatttaaaatttactaaatttgctttatcatataactatccatctgtccatccttctctctaaccattaagcatcttttgtaaatgcctttcaagggaagttacagatatcactagaagttgggatttgaattggaccttcaatgatgctgttagatctccgtaggcagaagacagaaaggaaggggtagcccagacatgggaaagagtatgggtgaaagaacaggggtaggaatgtgcatggcgacttcacagaacaagaatgaggatgtaacagagggtgcccattagtgttgagaagcatgataatgaagggtggataggaggctgttggaagaggactttggccaaccaacaggcaaaagagtcccatttcgatgaagtaaatatggggaataggaatggccagagtttccagtagaaagaatataaggcacagtgtcaagaaattagctgtatagttgggcggggagagaggctaaagtaatggaagtatagtggttctagtgagccatgcatgacggaagatgagtctggagatcagtgacaatagatagggagataaaactattaagaaaatataacaggccagacactgtggctcacacgtgtaatcccagaactttgggaggccaaggtgggtggatctcttggggccaggtgttcaagaccagcctggccaacatggtgaaaccctatctctactgaaaaatacaaagattacccagacgtggtggtgcatgcctgtagtcccagttactcaggaggctgaggcacaagaatcacttgagtccaggagacggcagttgccatgagtcgagatcacaccactgcactccagcctgtgggacagagtgtgactctatctcaaaaaaaaaaaaaagaaaaaaaaagaaaatataacagaagaaatttgctttattgttgtttaaattcaaaaataatatttgttagcatataataataattcataacaatatgatctaaattgaatatttttgtaaaaatagtcttctacctgtgatcttcagagaacacctcaccttcacagagcttcatgaatgagtagacatccacattcttcaaacagtgacctgggtcaggctgtgcccgccactctcgtatttgtcatctcatgtaatcctcaaagcacccggagagaaaggcactatcgcccctgggatatcacaggaactaaaaaaatatcaataaatttcctcacaatccttcctccaaagaattgctcttaatattatgaaaattaaataatattagaaaacttaatttggagacacaaaataataatatcaaacacatatttcagaaaaaaatgacataaaagtttgcacaacctaacctagtggaaatatttggcaatatctgaaaaaaattttgattgtcacaactagggcattactattggcacctaatgggcaaacacaaaagatgctgctaaatgttctacaatgcacaggggagccccacaacaaagaattgtcaggcctaaaatatcagtagcgcagaccttgagggtctaacctaattagcacagaaactgggatatgtagctgctcaaccctttatttgttattttctatttttagagactgggtctagttctgtcgcccaagctggagtgctgtaacacgataacagcctcgaactcctgtgctcaagagatcctcctacctcagcctcccaagtagctggggttacaggtgctcaccaccatgtctagctaatttttaaaatttttttgtagagacggggtctcagtatgttgcctaggctggtctagaactcctggcctcaagtgatcctctggtcttagcctcccaaaatgttggattacaggcatgagccaccatacccatcctcaatccatgttttttgaatagtactggtgattttattttatagatgagaaatctgaggctcgagaggtgggatgttaagaaatttgcagccaggcgtggtggctcacgcctgtaatcccagcactttgggaggccgaggcgggcggatcacgaggtcaggagatcgagaccatcctggctaacacagtgaaaccccctctctactaaaaatacaaaaaaaaaaattagcctggcgtggtggtgggcacctatagtcccagctactcaggaggctgaggcaggagaatgtcatgaacccaggaggcagagcttaaattgagccgagattgtacaactgcactccagcctgggcaatagagtgagactccttgtcaaaaaaaaaaagggaaaaaaaaaaaagaaatttgcttagtttgtcttggtaagaagtggtagaaatgagattttttacttcggttttctgatttcaaattcaatgcctttcagttataccatgactccagaaagataaatgggttaaaatgatgacatagctttgagtcatagtaaatgagagaatgttagctccagagactaagtgacatcggagaagagagttgttgggatctaagagcagattgtagtgatgacttgagttcctgatattttaaaatctccaagtgatggtgtagggagaatgcaagtgaaaatattcactggctatctggcaacaagaattggagttcagagggaggtcagaactggaaacgcactgccgttgacagcaggtattagctacagtcatgaggctgggatggagatatacattaagaaaggacagtggaaataggggctaaagtctaagaaagtgctcatagaaaagagtggactggtgaaagaggaacaaaaaaagatgataaagaaggtggactctaggctgggcatggtggctcacggctgtggtcccagcactttgggaggccaaggcgggaggatcgcttgagcccacaagtttgagaccagcctgggcaacatggcaaaactctgtccctacaaaaaatacaaaaactagccaggcatggtggtgggtggctgtagtcccagctacttgggaggctgaggtgggaggatctcttgaacctaggtaatcaaggctgcagtgaactgtgacgatgccactgcactccaacctgggtgacagagtgaggctctgtctcagaagcaacaaaagaagaaagaaagaaagaaaaagaggcaaagaaagaaggaaaggaagaaaaaagagagagccagagaaaagaaaggaaggaaggaaggaaagaaggaaggaagggtgagagaaaagaaagaaagaaagagagaaagaaagaaagaagaaagaaagagaaagaaggaagtaatgaaagaaagaaaaaaagaaaaaagaaagaaagaaagaaagaaagaaagaaagaaagaaagaaagaaagaaagaaaaatttgtttcttggtgtctaaggaagaatttcactatttccttgtccatgtattgccctaatctgtacagctgactacgtaaaatacttgcatcttatttatgctgtttgtatttagtcctaaaatcttaattagtcatgagaacaaaatttcaaattctatttaggcaaaagccttaaggtttcatcctcaacccccaaccttccagtagcttctatcttgacctggacaccccaaatattacttatctgtagccaatgttccctttttttctgtactgagtccacacattcttgtttgaccaaataacaggaacaaacaattcttttcataatggatgtaccctaaggtgtcaggcttctcagaatcctatctgaaaattaattccactgaaccatggtgcaataggattttagttaacacacgtgttatttattggctacaaatggtagggatttgacaaaatattctgtgcctccaggccagaaaagtacaaatagtactcaattctgagtagggaagaagaggaagggagaaagttagaacacaactattaatgcatgtggaggtaccagatcagctgaccacatcagcgaaaggttacttaactaataatgatgtaccattaatgccatgtccctattaaagaaaaaaaatattcaatgtcacttgttacagcatggtaaagaagactattcaggaccattgagacagatacagggaccactacaacgaagacttgcagtagggtagagagatggggctccactatgaatacagcagaggaaaatcggaatttatagccaagaaacaggatatgggactctagttaaatcgacctaacaggattcttactaaagacaggccaaggtgattagatatcacctggaggacagtggaggatgaggaacccttgggtgatcagttgtcaatgggaagggacgttattgccaaactgattttgccgggttctttgataaactggaatttacaaggaaatacacacatggtcttaggagaaagttcaggagcctgactaaagtttggccaaggaaaaaaatctttgtcattccccaatatttttaaggtaaaagactattaatactaataaggattaatattttttacacatgtataatatgcaaggcattgaattaaatacattctatagattaactcattttgattatcacaaagcctcgatgtaggtttaattttcattctattacttgcttttagacagatgaagttctgactatgacttggaaaagctgggtatctgggctcatttctttaccaaaatcctggcctctaagcgtcactgtccagtagaactttctgtgatgaagaaaacgttttgagtgctatccagtatggtagacattagccacatcttggagtgaagcacttgaaaggtgattagtgcaacagactagtagtaaaaaagaaaaaagcaaaacacacacaagaaacctcaattttaattacgattataattaattaactaaaatgtaaatagccatattttatagccgtgttgggactgtgcaaacatagcacatttccatcactgtagaaaattctgttggacagtgctatttggaagaaatgttgctccttccctttcctcctaggttggattctagggttcctttgctttgcttttcttctgcacagcgatagcagtccaacattctccacccccaatcctccagcctcagtgaaaggagattgttttgctttgtgcatctccctttctccacttccatgctgcctgtcagcagctatgtcaggtcttgagcgtggaaccccaaaggggtaggcacacagaagtgacccgtctgtatccggcactgcctatacgcattgcactcaccatcaccatcatcaacccacagttactgaactcgtaaaggatgaaaatcatcctgccagagatagaatcagacacacaaaatctgaacttctaatgaaacaacaacatcagtgacacagcattgaatagaataaacacagtattagctttggtctttgctagagccccctgtaagtggtgacttagacgaaaggaagccttgtgcggtgtcctagtctccaaaactttaaaaactgttgtcctacattatttaaatggaaagtgagacttatttgccacccaaagcaatgtttaactgaaagaagcatttttctgaaactcaaaggtattcaagcctttaacctaaagaccttcacggctgagaggtcagggctcactcatggcagcctctacatttacaggttcattttcaatgctaatgaattcttttacaagctgtatttgttctttcttttgtgagttttgaacatttattcactaatcatcacttaaatctaacctagggttttttgcaagtgaaaataggacttaaattcagatttatagttaaagggcaggaaactgagaggagggggatgactaaaaatagccagagggtaaaatgagaaaggactatactagactatttaaaaaaacccctggcttgcacagtggctcaagcctgtaatcccagtgcttggggaggctgaggcaggaggatcccttgagcctaggagttcgagactgcaatgagctatgatcgcaccacagcactctagccttagcgacatagtgaaatcccttctttagaaaacaaacaaaacgagactccttcccaaaaaaaaaaaaaaaaaaaacatacctacggtgccttgctgcgtggcaaatgctccctactgttcatcagtaactctttgtcgggcagatcatgaggtcaggagttcgagatcagcctggccaacatggtgaaatcccgtctctaccaaagatacaaaaaattagctgggcgtggtggcacgcgcccgtaatcccagctactccggaagctgaggcaggagaatcgtttgaactagggaggcggaggttgcagtgagccaaaatcgcaccactgcactccagcctgggcgacagagcgagactgcttctcaaaaataataataataataattccaaaaagcctaattcattttgaaattttgacatacagcgaaatcaccagggaatcttgcaaaaaatgcagattctgatccgcggttgggcctgagattccgcatttttaacaagcacccaggtgatgacctcgctgttggtctacgggccactcttgaagaagtgaggacgtaggctccaagatattggaaccagaccttgtcagttcagaggccttgcttctgacaaggagaggactttacagaaagttcgcctggaacctgtcctacgtggggtacgtcctggcagctcccttttcaggctttgagtcaacgtttggggaattgtattatgtaccgggcgcctacacctcactcatttcatactcgcagcaacaacatgaagtgggcgctatcatcctttgttttacaagcaaaagtgaggctcagagagttaaattgcccaaggttatgagattttcagatgcgttgaacccaggtccttttgactccaagagataacgcttttcactagcattctggagcttcagtttcctgtgctgtgaaatgggaaggattggctagcagggtccggatccctgccagatacacctaaaggaggccttgtattttttctcgagatcttgctctttgaccctgaggggaaaagttctttttgggaacaccgagctcccctcggcttgccgaggtcaggggtcatggctcttcccggggagggtccggcagtcctagagcggtttggctggggacacagaaagccggtgcattacataaccgcgagacgtccctcctccgctgcgcccctcgcccctagccaagccacagtacttagagcggatccccgcgctaaatcctctttgccggccaggcagagtccccggcggagctggcggggctgaatgagccggtgcatttcgaaggccgagcactgggattttccgcgctacgcttccctctcccggcgttgccagctaggcccccggccccagcctcgccggcgcctccgcccagtccgctccccgccccaccgaagcgcggatcgcgcagcctggggcccgggaaggggccactgcgcagggacgcggctcggcgggtgcgccccgggggcatgtccgcgcgctaccgccagggctgcagtggtcccggcgaggtgaggaggcggcggggccgggctgggggcgggtgtggcaggagggcgggcggggcatgggggtggtctgcgcgctctgggcgggctgcagagcgctggagcgctggagctctgggctgtcccgggctcagtctcgccggcggcccccgctcccggatccccagcgccctggccaagaagcttcctcggctccccctcttccctctccctgacacggttgtgcagagggcgcggtggctcaggtgacacgggcatccttcaaggaagggcggcgggacggcggggcgctggcgctgtcgttggagctggaggaggacggggaccctccattctccgctgccctagcgcccatcccgcgccgggagcctgggaccctaacttgggtgcgtcggcgcgcagcttgggttgggagggagacacgtgctcacttgccctgtctgggttgggtctgcgctgcggccgagtttttgggcaggtggctggagaacgagcggctttgatctccatctcttgtggttttcaaatgcagacttctcggtggaatagagaccatctttcttctggattttatgtttatagtacattttaaaaatctctccccgtcccccacctcagacaataatatttatttcccgtgtgtgctatattaaaaacacaccggctttcagtggattgaactcaatttctcagttgcttcttgtccacaaataaaccagtgatacctgtattgtggactcggaaaagcgttcgtaacaaaattttgaagcacaatttcagtaagtcctggggctatttggttagtcttccgttttcacacatcagcattctaaacctcttatactatttatttatttagagacaaggtctcgctctgtcgcccaggctggagtgcagtggcgcgatctcagctcattgcaacctccgcctccccggctccaacgatcctccctccccagcatctggagtagctgggactaaaggtgcgcgccaccacgcccggctaatttttggatttttttttttttttttttttttttttgcagatacaggatttcgacatattggccggtttgctctcgagctcctgggctcaagcgatctgcccgctttagcctcccaaagtgatgggattacaggcgtgagccaccgtgcctggccataatttttaaaaatgtctagtcaggtgagtcctgccaggaaactggttaaacactctccttttgaagagcctctaattagttcatcctacctggttctttgctcagagctaggcactcccgcggcgtcaccagcttagcccagggggaaaatcttccggcctttcaaattcagaaacacattcgctccacaggtgtaagctcgctaacagttaaaatcatcagctagctgcccttgcattgtttgtcgctccccctccataaatgtcgtgccaaactgtggctaatggtgtttgacatcctccaccccctgcgcccccaaggtgaccggatgtttgctgaagaaatgaaggatgtaaaagagtagtggtagtaattaggtgaactggatttagtcacttataattacagggtttagagaaactttgaaactgaaaggctttggagaccatctactaaattcaaactcttcacgttacagcccaggaagctcagatccagattggcaaggattggctgaattcatactgttaactggtgatggaatcaacactagaatccagatcttctcattcccacctaactcagttttccaaggcatattgcctctaggcattttgagcaaaaataatatgactagcatcacctaatcacatcattttcctgttcttattttttatgttttttttttttaactgatgggattctgaaatagatgagaggttgatttaatcaaattgcttttgtggcacaatttttaaaggtgcaaacctttaattttaagtaatattttaaattatttttatattatggatatacagatacttctcaggtgaatgcccagaagaagaaaattagtccaaatagatgggagtaactctacccccatctttccttggagtcttttctgattctcagcaccctctatggtaatgatcgatcagaagtaaaaacatgaattatagtgttgaagtgttttatatgaggactgtttgtttattgtgattaatactatgaccaaaacaaagctaagaaaggagtttcaaagtgacttatttaacattgcattgcactgcatatttttcaatttagttcaattgagcagatatttattgagtgcctactgtatgcctagtgctgttctgggcatttgggatatgtcaatgaacaaaacaaagaactttgatcctatagagctcaagttgcaatttattcactagaatttttccaggatttcttaggcaggtacaagagaatttcagttttacctaagcaggaaaataaacataagtgatccaaactatcttccttccaatcctgcaattctgagaatcttataatcatggaaaaaaaaaaaactaaaaacgacaacaacaacaacaaaaaaacaaattcaggtgaagttactttgacttttatgagctgacattttactgtaagtgaattgcagttcccacatttggttatttaatatatgttcatttggagtcaatgaaattacatttcctttattgcagggagatcaccttggtgactaaacttgaagcacgggatgatttgttttcttaagagtgttagtggtaccatgttagtattggagactaattaaattagtttataagatgttgctttttatttatttatgaagatggtgttctgttgttattttgtctcactttacattttgtcccccactttcctccatattcatagactattagacattccagttttaagcattttctaattctctcaattgctttttcttcaaaacagcatagtttgcaagctcaggcatgtttattgtttttaacaaaggcttatcgaaatgaacttggcagtttttcagtcgtatacagccaaagaaaagtattcagtgccgcttttggggttgtttatgcattcctcacctaaccagttgctttgcttttaaaaattgccaatttggaagctattttcttatgagtacctttccagtgtatataaaaagtcacccattgaaatgatataataatttaattgatgaaaactaaatacacagttgaagaggttgggggattttgaacagaaagattttccctctgataatatttttaatgtgctctacatcaaaggacatcagaaagtgtcattatctaacaatgtcctgtttgaaggtggtgtctgttgaacatttggggaacagtcacaatttctgatgcatgctaggcacctggagtagctgatttttttttcttcattcacccaccactgtgccccatcagatacatatccttccttcatttaccgcgcattgacgagtagggttaattgctgtagccaggtaagatgttgcatgaaattaattaattatttaattagtgtgctcattcatttattaatttaatgaatatttattgaacttctacttcttattaaaagatttgtataaggatttgtgtgaagactgtgttttgagcatctcttttctggtgctggtgacagcaggacgtgtaaagacacagaacatgcctctgatgcagcttacatcctggtatggaagagaggacattgtatggctagctatcataccgattcaaactaccataagagatgcataagtactttgggaattaaaaggaagaagagagagcaggcaggcactgtgaagatttgagggttagggaagactttgtagaggagggcccattggagttgcttcttgaaagatggtaaagcacggtaaagcttttatagaggcagaggatatacctatctttatggcagcacatccttgcctctttttgaagacacgtagagaacttcctcttgggaaccagttgaggctgtgttgggtcatataatagacacttatcacctctctgcccctctacatgcatgtgactctgttctgcttaatgaaatactgcccaacactgaaacaactcattggattaaccaatgctctcctcctctgaaccacatcctggtggttgctcagacacagagaccgctgtgggaaatagctatcatcttaataaatttgtatacttggctgttactaggtcaggtgcatgcttacagcggtgtttggttacagtccagtttatgccagttgtactttgctattgtatttttgtttttttctttgagacagagccttgctctgtcacccaggctggagtgcagtggtgtatttcgactcactgcaacatccgcctccctggttcaagtaattttcccacctcagcctcctgagtagctgggattacaggcatccaccaccatgcctggctaatttttgtactttttttttttttagtagagacaggatatcaccatgttggcaaggctggtctcgaactcctgacctcaggtgatctgcctgccttggcctcccaaagtgccaggatgctattgtaattttgtgatttaatgaaatattgcctaaaccgatgtaatatgaatgctaaacaaagaatggtatttctgtgaaaactaagttgatcgctatatggacccataaaagtaagtaatgttaaaaaaaatatatcaacacatgctgcgacatggatgaaccttgaaaacattatgctaagtgaaagaagccagatacaaagaccacatgttgtatgatttatatgaaatgtccataataagcaaatgcatatgaacaaaaagtggattagtgattgccagggaagtggggtaggggaaatagagagtgactgatgatggatgcaaggttcctttttggggtgacggctatgttctggaattagataatggggtggtggttgcacaacattgtaaatatatgaaaaccaccagccgggcgccgtggctcacacctgtaatcccagcactttgggaggccggggcgggcaaatcacaaggtcgggagatcgagagcatcctggctaacacggtgaaaccccgtctctagtactaaagtacaaaaaattagccgggcgtggtggtaggcgcctgtagtcccagctactcgggaggctgaggcaggagaatggcatgaacccaggaggcggagcttgcagtgagccaagatcccgccactgcactccagcctgggcaacagagcgagactccgtctcagaaaaaaaagaaaaaaaaaaaccaccaaattttacattttaaaagtattaaaatagtgaagtttatgtgaattttatctcaatttataaaaggactataaagctttttaaaaagcaacatgaacaagcaaattacaaaaggaagagggatgagtacttaggtgtggcatagtgataagagatttgaagagtacagtaaaaatttctagaatgattttgcattcaggttttttcacaagctccaataaggtcctgatcctctttaagaaatggaagcaggaaatctggatgtggattaaccaagaaaaataacatagaactccaatcatgacccaatatccaaagattagtgaatgaattttttgtttatgaaaggaattgaaacaaaatgttcaaaatatgttgtatcaactttttgactctgcttttcctgacttctgattactttactgctgagagcttctaatgtttccatttctgagggtaccctgtatattttgaaaataactcatttctgtatctagagagaaattccatgtctatgagcctcttatagatatagcattagtcacttaagactgtaaaggaggccgggtgcagtggctcatgcctgtaattccagcactttgggaggttgaggcgggtggatcacctgaggtcaggagttcgagactagcgtggccaacatggcgaaaccccgtctctactaaaaatacaaaaattagctgggcgtggtggcacgtgcctgtaatcccagctactaggggggctgaggcaggaggatggcttgaacctgggaggtgtaggttgcagtgagccgagattgtgccactgcactccagcctgggcaacagagagagactgtctcaaaaaaaaaaaaaaaaaagactgtaaaggaaattgggactcagtttcccaacttctgaatcaccataaaaatcagcaactgtttccccctaacaccgtcttctggctcggtggttcatatatgtaaacaaagtagctacataaagtgttaactataccaatacttaaaaattatcacccaaatcatttgtagactatgtttttttcaaaatattcctgagcacaattaatcattttgtggtttatttgacatattataaattagggccataattacttattttgggattccactttgcttgatggaatactttccatgggagtgagttcatatttatctactgaaaccagatgtatttcttgaaacagaaatttcagctctctgaacctgtaacttcaaagcaaccacattcatagcccccgaaggaaccaccaaaaaaataaaaactcacgacaaagttaaatctcataagggagaacagaatgctgcttcttcaggcagtgatagttcaaccagacaactatcaaaaaccagccttaatcatcattattaaatagttatgaataggggtagcccaaactcacaggcataaatgatataaaaaataaatggtctgttcaggttgacacctgacaacctagtatccataaatcagttgattgaagactctgtatcaatggttctcaaccccacctacacattagaatcacctgaggaaggaaaaaaactggtaccaatgtcctactctgaaaaattctgattccgtaggtctgagatacagggctagggtattgatagtttttaaatctctctggtgaatctcatgtacagccagggttgagaaactatggacatatgtaataataattttgtgcctctttagaaaaaaattttattgaaacataaaatttcatgtgtggtatattcttaacatataatggaaattttttgtgtgtgcattttctctatagagggcccattcattatatggaaagcttttcccaatggttgaatgaatgttcagtgattttttttcttctctgtggaattcactaggcttatgtgtataagatgtcaaaacaaccaaatcaacacaattgatataattactgtcaaccaatgaattaattaaccaactattttcaagtttttgatgattgtggtaccatatgggtatttttgtttaggacaataatttggccttttactctacaacaataatgtgtttcctctaaaatacttacagatgtgtcctttattatgtgtttctttaaattgattgagttgtcaaccttaatactcaaactttctctgaaaactttctgtttttattcaattgcatcaaattaaataaaaagggttatcttgggacagggtctctctttgtcacccaggctggagtgcagtggccttatcagggcccactgcagcctcgacctcccaggctcaagcaatcctcccatctcaacctcccaagttgctaggactacaggcatgagccaccatgcctggccagacttttatataagaaagatattatataggactcttacgtaagaaagataggagtttaaaccttgccctatgtgacttcaacaaagtatgattaattttagagctttccttgtcattaggatttattgtttttgagaaaatgtggtgaggtgactgatacagattctgaagatttatctagtagactactcctacttagaattcacctctttttttcttttctctctctctctctctctttttttttttaagagatggggtctcactgtcacccaggctggagtgcagtggtgcaatgatggttcattgcagccttgaactactaggctcaggcagtcctgcttcagcctccaaagtagctggaactacaggtgggcaccaccatgcccagataaataattttttttttttttgtagaaatggaaatggagtcttactatgtttttccaggctggacttaaactcctgagctcaagcaatcctctctcctcagcctcccaaagtgctgagattatagatgtaagctaccatgccagccccttatttttttagttttattattttttttttgaggtggagtctcactctttcacccagactggagtgcaatggcatgatctcggcttgctgcaacctctgcctcctgggttcaagcgattctcctgcctcagcctcctgagtagctgggattacaggcacctgccaccacacccggctaatttttgtatttttagtagagacggggtttcaccacgttggtcaggctggtctcaaacttctgacctcaagtgatctgcccacctcggcctcccaaagtgctgggattacaggcatgagccaccacgccctactcagccccttattttttttaatttgttcttatttggttttaatgctcatggagattctcacccactgttaccagttagcttccccaaattacactttaactgttgattttgtaataaaaataaataaatttttatccacgaataaaaatcttaatggattttggccagtagattttaaactgtattttgcaaattcctgggagtatcagggagcacctctggagctgtgttacagggcatgagggcaatgggtggcagaccgatgtccagcttccagctttgggctcctttctggtggccccttctgctatctgagtaggtgttctgttcttgatttcttaatggattttggccagtagattttaaactgtattttgcacattcctgggagtatcagggagcacctctggagctgtgttacagggcatgagggcaatgggtggcggaccgatgtccagcttccacctttgggctcctttctggtggccccttctgctatctgagcaggtgtcctgtgcttgatttcacatatttggtttccaagtaagattttatttgaacaaaggatttcttggccaaaacaagtttgtaagtgattgggccacatgtttctaagtttctgcttcctgttccttgccaaatttgttttatattctggcagctcctaattgtttcaagctacgactgcggatctgtgttgaaaagcctgggaaatcttcggtcttaataactttataactttgatgcctgtggggagagataaccaagtaagcagttagatatttacagcaagaactatagcttgggagttatcagtatagggactcagttcaagttatatgtctccccaggagagtgtttctagagaggggtgagatgggtcaaagatcaaattctggggaatagctatgctgggctaagtgccgttctctgtattcacgttaaccaaatgtgcattttggttaatgaagtttgcatttcatattttaattttataattcccccatgtacagttgtacataactgccaaaagagttgatgcatgggtatatatgtgtgtgggggcggggggtagcatgatggggtcagaggacagggcttggaaaccagccaaggatgcttatcctttctttgaaaaccctgcatcatgcacaaatcactggggccccttctacatgcaggttgaagtgcacaatgagaggataaacttgggtggttacctagtgaatttggcaattcagacagctgttgtggcattttttgacataaaattatttgttaagaaatatcacggtttcttaccttaaaaaatccagacatttcccccgtatcttagttctcccttgtggaacttgaatagtgactgctaggttttgggtgtgatcccatggacgtttaggtcaaatccccactccacatgggtctgtagctaattgtgttttattgacacagactccaccctcaatgccagccggctctttggtaaatttagtcatgaggaacacctggcaacagctactaacttaattaaaaaattcaaaaacactcttagaaaaaggcagagtacctagataaagaacaaataaatactcataaataagatacttgttaaaattattttaccggataattgaagtgttccagtgattaagggactcgtcattttatcaaaattaagccccatacattttttccttcctttcttacttgctgagattgacttctttcgttatcttccatatccaaaaaaagatcaaatttagacaaccatatattctgattttattacagatgaagatctaactaaaatttcaagttttgctcagtaactgatggacccaaattggtatctcagaatgttcctggcatattctgctttctttgtcaattcttgcatgatagtatacctaattgactgctaatgcaggctctgttaaggtgaaatttcagtttagctttttttttttttttttttttttttgatatggtgtctcgttctgtcgtccaggctggagtgcagtggcacgatctcggcccacggcaacttctgcctcccaggttcaaacaattctcctgcctcagcctcctgagtagctgggactacaggcgcacggcgccacgcccagggaatttttttttgtattttagtagagacggggtttcaccatgttgcccaggctggtcgcaaactcctgagttcaggcaatccacccgcctcagcctcccaaagtgctgggattacaggtatgagccactgctcccggcctcagtttagcttttaacagctttaagcagaatctgtagaagggacatttgatttagatgaaatagaattaattacctttaaagtctctaacaaaaaatattgtgattaaacaatgctgaaaataacttcatgagtttacctcttcccaggcaaacatgcactgaggccctgccatgtgttagacagtgttcttcctcaaaggcttgcctttttctggggaagatacttcccaggagatggaaagcctttgaggaaaggcctctgtacacacaagtgtgtgtacaaagtatcacagcattggaatgagtcccataagtgatcatctgctatggacgtgcagagccagaggcacttaacgttgctgaggttggtcaaaccattaaataattgtagaaattcgcaggttgaaccttctaggcagtaggagcaacaggtgcaaaagcgctgaggtgggaattgccttggaattgaaagcactgctcatcttcggatggtgtggcatggctgacaggtagggaatatgtgtggccaggggtctggagaaggctagaggagcaggcaggagcgagagcatcagggtctggtacatcgcaccaccaaggggttttgatttttctttgagtttttgaacaagggagtgggtgggagtggggatttggtgataaaattagcttgtgtttcaagcagttaactctgaatggggtttgaagaaaggccccagagggtctgttaaaatggtgcagatgggaaataagattaatgccttatggtaagacttttatttattatttttatattcctgttgcttggtgccctataaggcatgtggtagaaatgcgtggtagaaagtttgatattctgggcaagaaattcaaaattgtatcatccgctaagaagctcagttgaaatcacttgtctggatgtcttttcctgaggaaaagggaaagagtgaggtatgaaacaggttgaagaacttgggggaataactagactgtgctcacgcgatacccagggcatctctcagtcattgcaccttttgttttattctctaattatctagctgtgttttggtctttttcactggtccaacaagagggcaaggactatgtattctttatagcttcactgccattgcacaactttggatggggtcatttatatgcctgtgtagtgtgtctgcactgtgaatagtgcctggagtagtgcttcagcttaactggtcctagcagctgtcatggtacctgacatatggtaagagtttaatatgcttgttgaatgaatgaatgaatgaaggaatgatgacacaacatataatgagtggtcagaggaagagaatctagcgaaagaaactaagaagcaggggttggtagggaagaaagataaatagtagagactcctatcatggaaactcagggaaaaacaagttttagtcatgacagagaggtcaacagtgccacattctacagagactggccaattaagaatgccagagtaaacactggcaattaggagtcactggtgataatgtcaaaaacagcctgagtggtgtgtggaggacacaggaggcaaattcccttccattgaggtgggaatgggaagagaagcaaggagattgtcagtatagacaggaccttagagggtgggtttgtgaagggaggattctaatccgtgagagccagaaagggtggtaaggctgaaggggagttttcttccctgctttttccttctcttcccttcttttctccctcacattctcccttcctgctttcaagaaaagagacacatgagtaaatttataggctaaggagaacccagtgaaaaggtctaggttcaaaatacagaaaaagtagtaaaggatactagctggcaagactaaatatagagtgacaagtctttctttgaaacaggaagaaaaaagataaggatgcatgtggatatgaataaattggagaaataggaaatggaggaaaataataaactgaaagaaaggaaaggaagtggaggaaaatcccatctaaggtctcacttgtgtctacaaaataatagctaacgtgttttgggcactttctatatcgcaagcattgttaaaataccttacatagataactcactaaattctttccacaaccttttgaagatggaattgtcttaatttacaattgaggtaactaaagtacagagaggttaagtcacttgtctgaggttatagagtgactaagaggcagaaccaggatgcaaagctgtgtaccatcatgctgtactgctgaaaatgaggggcacatggagtacttaagacttcaaataaccagtgtatgtaaggaacaagtgcaatacatttttgctgagtcacaccaagcacttagtttctgttggaattcataattatgttttgccattaatctccaggattgagagatttcctctagtaaaacttgatttaccagttgtagaagtggaaatgtttgggtgttcagattgatgcagaattgggggttagtagtttgaaacagaggtgcttctagcaagagagcaattgaagtgatggaccatgaggtctagcagccaagaagagggaaaagagagcaggaccagttaatggaatgggggaaagcggagcagcaaaggacccaagggctcaagggggttgaaaaccaggtgcaataagagttagggtgttggagatgtttggaggatagacagttgggattcaagaaggatacttaattctcaatacaactctagatttcagaagtgagggctggcttcaccttgtgatgacaggtagatagtgtggctttgggagtacatggctgaaatggattggaggtgaatgctatgggacatgaggtggtcaaacttgacgctgagaatggcaaagctgctggatagatgttgactgggccctgcctctcattggaggatggttcctggtagtcctaaggacggtctggacttcaggaggacacaacccaagtatgggcagtaatatggaaagatacaaaaggatagctggtttccggcatacaataaagaccacttgatgatctcaatagaacattgtcaaaggacagttgcatagcttacattttgcatggcagtgtttgaaaaataactcgaagtatgaattggcaaaacaacacacatcacaggtaactttggatgcttcagccagattacaattgaaagaaaagactacatgccctgatgaaacctcctcctcttcttcctcctcctccctctttcatttttccttgtaatgtgcagtgtgacactctctggacagagagaggcagctgaagatcatcaggcttccagatgtggagctttgttatgacatgtgggggtgagggtcatgggagaggggccggaagcttcagtaggactcagtgtggtgtcctctgcttctgtagtttagccatgtgatgggaaaccagcaatatgtgtttcctttgtacagctgtacatatcattgtttctttttctcctctgcccgtgtaggattctaggaaatcaaagttagatctgatgtaagcttagaaagccccacatatgaagatatggagctattgctctgtgacagaatatgtgtactaggtctgatccataagtgccatgcgtagaaaatgtagttggtagcacgttttggggtgtaaggaacagaaatctcgacttggactggctttgttgggactgggatcagttacaatgggatcagctacaatgtctatgacagagacaaggcattattgtcagattcagacagccttactaaggggaaggagccttggctggcaatcaagtcctcaacttcagcatttgatagcagcatgcacttggacagatatcaccttccatgagcctcagttttctcttacaagaccattgcagggattgaaagcactttacataaactctaagtagctatacaaatgtgacttactcatttaatagtaaaaataatgacaataacaagaatacttccatttactgagcatgtacgtgttccaggcactggctggaggcttatctgcattctctttattacccactaaatacataacaagcaatgatcatatccaggcactctagtaagtactttatttccaatctcagttaagctgagatctgaaacattaaggctcaagggcaggggcagagaacaggtatgggttcagtttcacccaggggttccattttttttttttttttttttttggcctatgtgacccagtaatggcagctgacatggggccttggacagttcttctatctgccagggattgtcatttgctaactagttcagggctaactgcatgggtgatttccaaaacacaagtgtacgtgtgcttttaaaacactcgatgcttttgtttctactgttcttttctgaaatgtaagctttttgcatttttaagcttttgaaatagttgagggatttacaaatgcttattgagttctagtatatgtattggctaatttgaacctcatgaagaagtcaagcttgaatttgtattgtattaaggcttagtgaccatgggacctgtcagtaaggtttgaagttagaaggtaggggacataattttttgatgttgcaaattgccttgctttgagcattgtgtgagatgatctttttccatatttttggtttatattgttatgatagttttcctgaagcagccttggtaggtgggtcaaagggtttgaacttctttttatatagatagcctgattgttttgtggaagctttttggatggtgacaatgatatacttgtagtgctatttgagaaatatgcgtttttctctttgtatgatttttttttttcagacagagtcttgctctgtcaccgagactggagtgtagtggcgcgatctcggctcactgcaacctccacctcccaggttcaagcaattctcttgcctcagcctcccgagtagctgggattacaggcgcccaccaccacatccaactaatttttgtatttttagtagagacagggtttcaccatgttggccaggctggtcttgaactcctgaccttgtgatctgcccgcctcagcctcccaaagtgctgggattacaggcatgagccaccgcacccggcctttgtatgatgttttatatgtctgggattataaaagatttccaaaaaatctgagtcattctgttgacatgtaacattcttttcctcggacccccccaccccctgcaatgacaataaaaatgatgtttccatggttcagcctgtactagatcttgaggaaatccagcctacatcaattcctgcctattagttcataaagtctcggggggaagctaaacttgtgcatctgaattcatcctcgccctggtgtgagttccctctcaagaggcttcctgatcctgtgtgcacatacactccctgagggcctatattacagacacatctgttttttattcatagttccggttctcacgctgggatccctgctatactctcaaacaatttatgagtaaattgacgtggaaaacgaagtgggagataccagtttttgctgatagggtatttttttttcttctctcaacttttgttttaggtttaggggatacatgtgcaggtttgttccgtgggtaaattgtgtgttggtggggtttcgtgtacaaatgattcacccagcagtgaggatagtacccgatgcgtagttttttgaccctcacctttctcccaccatgcctcttcaagtaggtcccactgtcttttgttcccatttttgtggcacagtatcaatatgggatatgtgttttggagttgtagtgaaagtgacaagactttcattcatataactgaatgtcccatagaattatttcaacaattcctaaaatacttctccccaactgttcctgcctgccctaagatatactaatgctgaagctatgtagcaaccaccactattcttaaatagatttttaaaatatcatagttgtgatcatagtgtatatttagtatataatatatattgagtatttatattttgttttctgcctgtacatttccccaggtaattttaaacacctaatgggttagatatgataataggaaaaagcaaaaagtgggaccacccctgccacataagggtccaccagcagtgaccaaaactgtggccaggattgttgggtaggtggaaagagagtgctctttgggggctgggcctcagagtaaccctatgagtaggtagaagatggaggcccaggaggtcacttgttccaggtcacacagcaagtcaatggaaagcctagatttcaatcctaatcttcctaaatccaacttgcatgttctttgcttttcttcgtttctttttccagatttgaattttttaaatcacctcgaaaataatccaggctctagagaagggaataaaggagatactgctccctccactgtctctcataccttaggcttgcaccgtgaacagtttggtgtgcttccaggccaacttccttgcatgtacaaattgcctaaggaaaccagctatgcctgtcaccagccagacagaacagctgctggggttagggcacgacttgtcttctccaggacctacctcggtgaggcttgtggcatgctgggctctggggaccaggacacactgaagtttaacagcaacagagagaagccagagtgcccctggcagccaaccttttgggaaaggagagctatttgtgctctctggctttctgcctgcactgttctgacttcccaagcagagaacagagctccttaccagtggagggcttcatggaggcccagggactgcctcttgtttatctctgtttttcctgtgcctgcatttattggtgcccagctactgttgcatgaaaggaatgaagatgccctaaccctagttctgctggtaaatcatttgagtgactttgagcaagtcacttcaagattagaagcctagtctgttttccccaagtctaaggtgcccttttttccctccttattttaatgtttctgaaataagatgtgattggcatcttaggtgtatatatttaatatagtagtgtttcttaatttttcctttttcttgaaaagttgtaatagggggataactcacaatgtatgttattctaggactgttggaatatggcaatcattttcttgaaggattgttgagatagtggctacctcctgtgaactgtgaagttttatataaatatcaagaatcagaaaactgcccagctgtgttgttactgcccaaccgcccctgtttcattatttctcagagatgcccagacaggaacttcttgatttaaaaagtaatgacattcctctattcaataaagttggagccaggtgcaatggctcatgcttgaaaccccaggggtttgggaggccaaggcaggaggattccttgagtctaggagttgagactagcctgggcaacatagtgtggccccagtctctacaaaaaaaaaaattaattacctgggcaagtggcatgtgattatagtcctacctacttgggaggctgaggcaggaggattgcctgagcccaggagaggttacagtgagctatgattgtgctactgcattccagcctgggtgtcagagtgagaccctgtctcttaaaaaaaaaagaaaaggtggtattctaggtacatttctattctgtcccgtcgccctgccccccatggaactcaataaactattttgtttttattttttattcttttgagatggagtttcaccttgtcacccacgctggagtacagtggcacaattatagctcactgcagccttgaactcctgggctcaagggatcctcctgccttatcctcctaagtaggtgggattacaggcacatgccattgcacctggctagtttttaaaattttttgtagagatgggagtcttgttgcgttgcccaggctaatctcaaactcctggcctcaaacgatcctcctgcctcaacctcccaaaatgctggaattacaggtatgagccatcatgcctggtactatttttatttcaagtgaaacaaacaagtaaacatggcttttaaacatttgaacttttcttaaattaggccttagcaagaatcaattgcttactatggatttagtggattcctggcccttactggaaatatcagtagggccacaaaactcttaaacagaacgttagtccaaaaaagaagtgttgggactcaaactgaaaataaggaagctattgaatgcttacaatcttccaggtgacatcaggggatcaaaaacaattactcagacactctattcctgtccagatagagttaagtttggagggagcaaaggttgcaaagcctaggaactgagctaaaatttcactttccagcttaattcagccaatttgccctaataccaagtctgaaggagtttgcaatctagtaggaaacaatttaccttgccagttaaaaacatggtgctaaccaaatcaccagtggaaacaagatcacagagagagtatttacattcctaaaagaaatctcatcagttatttagagtttctattttcaagttaatggtctgtcacagcatttaaaccagaggttgcaaagacagacgttttgggggcctccagtgtgaagtagccgagtggtgacatcatcgggaggggctggaccatagccaaatcagagaggacacgtcagggctcattctctcaccattccatagatacttaagttccgctcttggtgatagggatacatcagtgaacaaattcaacaaaaaattcctgcctctcggagtttacattctaatctgctgctgtcttagaaaacaaataactaataagagtaaatgagtcggacacaccggtgtgttcctgtgagtaaattgtatggacttagattttgttcgcttttaggcccttttcacacagctaagattctgcatacataagatttactatataatatacgtagagttagtttgtttttggcgttctgcttggtctgatgatataacttgccaaatgaccatatttataagatataattggctctgcaaggcagtactggtttatttaattctagttttgctatttaattgaaaatgaaagctcattgtgaaaaatcccatttctttctcctgttatggtactgattgtgatgactttctgtggttaattcatgatgacttagtgatttaccatggccacagttatgaattccatggctctgggctggagagtgagggggtgctcttgcaagcctggttttctttgggcaacacaagcagggctttctacactgtgactctgatgagatcactataataacaagcctgggagcttggacctgggaaaccatatgccttttcttgagcttcttgtgggaaaacggggataagaagcatctggaactgcacttatcttcagtttcgacaagtggaacttctactgtgcctgtaaagtgaggcaaaatggatcgttgttgacagaaaaaaagcaggtggctggaggggaatagagccctccgacactgacttcaatatcctgggtgactctgttttagcaaatgaatgaataccgaggatatgaatgtctgtggcatggattcctgtttcaggaggctctttgcatgtgaacctaggagcgcattaattctgctgaacaagggtcttaacattcccaatgtgggggatttttcactggagggatttgagagtcctgacaggctgtatgtattacagaagtggtcttgggaaatccatgtgtcctcatgtaatcatcatccattgaaattgctccccagtacctaacaggccgcttttcttttcttttttttttgttttgttttgttttgttttgttttgcttcttttttttgagatgaagtcttgctctgttgccaaggctaaagtgcagtggtgaaatctcggctcactgtgacctctgcctcctgggttcaagcaattctcctgcctcagcctcccaagtagctgggattataggtgcatgccactatgactggctaattttttgtatttttagtagagacgaggtttcaccatgttggccaggctggtctcgaactcctgacctcaggtgatccccctgccttggcctcccaaagtgctgggattacaggcatgagccactgcacccgcgcacccggcccgctccttttcatctctacaaagtacagtgggcactattgtggattgatgggtcatgtcaacccagatttatgtttaagccctgtaaacattgaggaaacattgtcacccccaatgtgatggtatttggaagtggggcctttgagaagtgattaggtttagatgaagtcacaaggatggagtcttcatgatgaaattagtgtcctgatgagaacaggaagagagaaaaatctgtctctccccatacatgctctgagaagggccatgtaagcaagcacacagccagagggccattgtctacaggccaggaagagtgccttcaccagaacccaagcatgctggcactctgttctcagacatccaacctccagaactgtaagaaaaatgtctattgcttaagccaccagcctatggtattttgttatagcagcctgagctaagacatacacagtcctctgatagtatcatttctttcttatttgacttcagtgacaccaagctctcctggactgctctttatctttctggccacactttctcaatttccttgcaaccgcctcttttcctaacccttcctaatctctttcttcttccacctacctgcaaggcaccttgctactcttacggtctgtagaccagtgaaggcgtcacttgtgagcttgtcagaaatgtgaatttcagattccacccaaatctgccaaatctgaatccgccatttagcaggtggtacctaggaaaatctgagaagccctgctctttaggatttcagttatcaactgaatgatctgatctccaagtatacatctggacactagatctctctcctaggctcttgaccagttcatctaacaggtccacttagaggtctcacagggatatcacacttttatccatccagaatctgacttcttttttcccatatatgcctctccttctttgagcaaccaacaaaatataggacctttccagaaagttttacttaagaatgcccatttaaccacatactcctggtttaaatggtttctttggggtcagggctaattgtcagctggtgggcactggtctgactagtcccttgttctactggtctctgatttctcagtgttatcagtctcttgctaaatattttgatttttacccatcaagtcacatttgattagtaacaagtctaactttttatcttctgtgatgtttcaaggtatacattttataaatatattaagtattaatcattatatttgttattaattcattacagatgcaagtggtaaataaatatttttaatggtgaggaaatatgatattctctaattttagtgtcagattttcaaaatatttgtgaatgaccacagtgagtccaaaggaagaaccatcaggaatgcagtgtgacctgatatgtcacatgattgaatcacacatctttttgggagagagaaatcagagacaacgtaactgtccaacaagaggggattggtgaagtcagttacagtgcattcaaacaatcaaatactttgcaaccattaaaatgatcagacagagtacatttattaacataagtatacatccatggtatcattatgtgaaaagagcaatatagattaaatgatcgcggtttcatttttttttaaattatggttaagtgtacataacataaaatttaccattttaaccattattaagggtacaattctgtgtcattaagtactcaataggaaaaacaaactgttttcctgtctagtctattctcaatacttgagaaaactttgacatcaaaggtatggggttttccacactgagtagtcctccagttctctacagataccacctaggtgtcctgcaatttaactcagttctgaaactatctacctggagatagcagatcccacagattaaggactccatcccataagacagcccccacttcagatgccaattccacgtcctggttggcacccatactttgacccaacctgctttaaatcagaggttccaaccccctcttgggttcgatcttttgctagaatggctcacagaactcagaaaaccaatctacttactagattagcagtttattacaaaggatatattgaaagatacagatgaacagccagatgaagaggtacgtagggcaaggtccgggagattcccaagcttctctcttactggacctttggcttgtggatgcattcttgttcaccagcttggaggctctctgaacactgtccttttgggttttaatggaggcataattgcataggcaataatcattaaccattggtggttaagtcaatcttcaggccctattccttcccctaaggtcaagggtggcttgggttggggcagaaagttccaaccctctaatcacaagtttggcttctctgcaaacatcctccaacctgaggctgcccaggagcctgcagacactagtcatctcattagtgtgcaaaaagaaacatcacctacaagatttgaagttttcttaaaattccttatgatggggagcgcagagaccaaatatttctcactatgtcagaagtatgttcaccattcgcattgttgtgtattaatcaccaccatccatctccagaactttttcatcttcccatactgaaactctgtgcccattaaatactaactcccctttctgctctccgtcaggccctggcaaccaccattctactttttgtgtctatgagtttgactaccctaaggacctcacgtaagtggaatcatacaatgtttgtagttttgtgactagctttttcacttagcataatgtcttcaggcttcatttattgtgtagtatatatcagaatgtccttcctttataaggctgcgtaatccattatgtgccacattttgcctatccattcatctattaatgaacatttgggttgcttcctctttggggctattgttaataatgtgtctatgaacatgggtgtacaaacatttgtttgagtcctggcttttaattcttttgggtatatatctgaaagtggaattgctggattgtatggcaattctgtttttaattgttgtttgtttttaaattttatttgtttattattattatactttaagttcggggtacatgtgcacatcatgcaggtttgttacagaggtatacatgtgccatgttggtttgctgcacccatcaactcgtcatttacattaagtatttctcctaatgctatcccctcccccagcccctccaccctccgacaggccctggtgtgtgatgttcacctccctgtgtccatgtgttctcattgctcaactcccacttatgagtgagaacatgcagcatttggttttctcttcttgtgttactttgctgagaatgatgggtttccagtttcatccatgtccctgcaaaggacatgaactcatcctttttatggctgcatagtattccatggtgtatatgtgccacattttctttatccagtctatcattgatgggcatttgggttggtatcaagactttgctattgtgaatagtgctgcaatacacatacgtgtgcatgtgcctttacagtagaatgatttataatcctttgggtatatacccagtaatgggattgctggatcaaatggtatttctaattctagatccttgaggagtcaccacactgtcttccacaatggttgaactaatttacgctcccaccaacagtgtaaaagcgtttctatttctctacatcctctccagcatctgttgtttcctgactttttaatgatcaccattctaactggtgtgagatggtatctcattgaggttttgatttgcatttctctaatgaccagtgatgatgagtatttttttataagtttgttggctgcataaatgtcttcttttgagaaatgtctgtccatatccttggcccattttgatggggttgtttgtttttttcttgtaaatttgtataaattatttgtagattctggatattagccctttgtcagatggatagatttcaaaaattttatcccattctgtaggttgcctgttcactctgctgatagtttcttttgctgtgcagaagctctttagtttaattagatctcatttgtctattttggcttttcttgccattgcttttggtgttttagtcgtgaagtctttgcccaggcctatgtctgaatggtattgcctaggttttcttctagggtttttatggttttaagtcttacatttaaatcttttatccatcttgagttaatttttgtataaggtgtaaggaacggatccaggttcaactttccccatatggctagccagttttcccagcaccatttaaatagggaatccttcctcccttgcttgtttttgtcaggtttgtcaaagatcagatggttgtagatgtgtggtgttatttctgaggcctctgttccgttccatttgtctgtatacctgttttggtaccagtaccatgctgttttggttactgtagccttgtagtatggtttgaagtcaggtagcaggatgcctccagctttattcttttgggttaggattgtcttggctatgcaggctcttttatggttccatatgcaatttaaagtagttttttccaattctgtgaagaaagtcagtggtagcttgatggggatagcattgactctataaattactttgggctgtatggccattttcacgatattgatccttcctatccatgagcatggaatgttctttcatttgtttgtgtcctcttttatttcattgagcagtttgtagttctccttgaagaggtccttcacaccccttgttagttggattcctaggtattttattctctttgtagcaattgtgaatgggagttcactcacgaattggctctctgtctgttatcggtgtataggaatgcttgtgatttttgcacactgattttgtatcctgagactttgctgaagttgcttatcagcttaaggagatttggggctgagatgatggggttttctaaatatacaattatgtcatctgcaaatggagacaatttgacttcctgttttcctgactgaataccctttatttctttcttttgcctgatggccctgggcagaacttccaatactatgttgaaaaggagtggtgagagagggcatccttgtcttgtgccagttttaaaagggaatgcttccagtttttgctcattcagtatgatattggctgtaggtttgtcataaatagctcttattattttgagatatgtttcatcaatacctagtttattgagaatttttagcatgaagagctgctaaattttgtcaaaggccttttttgcaaatatcaagataatgtagtttttgttgttggttctgtttatgtgatggattacatttattgatttgcatatgttgaaccagccttgcatccaagggatgaagccaacttaatcatggcggataagctttttgatgtgccactggattcggtttgccagtattttattgagaattttcacgttgatgttcgtcagggatattggtctaaaattctatttttttgttgtgtctgctaggttttggtatcaggatgatgctggcctcataaaatgagtaagggaggattccctctttttctattgattggaatagtttcagaaggaatggtaccagctcctctttataactctggtagaattcggctgtgaatctgtctggtcctggactttttttggttggtaggctattaattattgccttaatttcagagcctgttattggtctatttagagatttgacttcttcctggtttagtcttgggagggtgtatgtttccaggaatttgtccatttcttctagattttctagtttatttgtgtagaggtgttcatagtattctctgatggtagtttgtatttctgtgtaatgacaatacacagaaattggtggtgacatcccctttatcattttttattctgtctatttgattcttgtctcttttcttctttattagtctggctagcagtctatctatttattgatcttttcaaaaaaccagctcctgcattcattgattttttttgaagggttttttgtgtctctatctctttcagttctgctctgattttagttatttcttgccttctgctagcttttgaatttgtttgctcttgcttctctagttcttttaattgtgatgttagggtgtcgattttagatctttcctgctttctcttgtggacatttagtgctataaatttccttctacacactgctttaaatgtgtcccagagattctggtatgttgtgtcttttttctcattggtttcaaagaacatctttatttctgccttcatttcgttatttacccagtagtcattcaggagcaggttgttcagtttccatgtagctgtgcagttttgagtgagtttcttaatcctgagttctaatttgattgcactgtggtctgagaaacagtttattgtgatttctgttcttttacatttgctgaagagtgttttacttccaactatgtggtcaattttggaataagtgtgatgtggtgctgagaagaatgtatattctattgatttggagtggagagttctgtagatgtctattaagtccacttggtccagagctgagtttaagtcctggatatccttgttaattttctgtctcattgatctgtctaatattgatagtggggtgttaaagtctcccactattgctgtgtgggagtctaagtctctttgtaggtctctaaatacttgctttatgaatctgggtgctcctgtttggatgcatatatagttaggatagttatctcttcttgtcgattgatcccgttaccattatgtaatggccttctttgtctcttttgatctttattggtttaaaatctattttatcagagactaggattgcaaaccctgctttttttcgctttccatttgcttggtagatcttcctccatccctttattttgagcctatatgtgtctttgcatgtgagatgagtctcctgaatacagtgcactgatggatcttgactctttatccaattgccagtctgtgtcttttaattgggggcatttagcccatttacatttgaggttaatattgttatgtgtgaatttgatcctgtcattatgatgctagctggttagtttgcctgttagttgatgcagtttcttcatagtgttgatggtcttcacaatttggcatgtttttgcagtggctgatgccggttgttcctttccatgtttagtgcttccttcaggagctcttgtaattatggcaggcctggtgatgacaaaatctctcagcctttgcttgtctgtaaagaattttatttcttcttcacttatgaagcttagtttggctggatatgaaattctgggtggaaaattcttttctttaagaatgttgaatattggcccccactcccttctggcttgtagggtttctgctgagagatctgctgttagtctgatgggcttccctttgtgggtaatccgacctttctctctggctgcctttaacattttttccttcatttcaaccttggtgagtctgatgattttgtgttttggggttgctcttctcgaggaatatctctgtggtgttctctgtatttcctgaatttgaatgttggcctgccttgctatgttggggaagttctggataatatcctgaagagtgatttccaacttggttccattctccccgtcactttcaggtacaccaatcaaatgtagatttggtcttttcacatagtcccatatttcttggagggttttttcatttcttttcactcttttttctctaatcttgtcttcttgctttatttcattaatttggtcttcaatcactgatatcctttcttctgcttgatcactttggctattgaagcttgtgtatgcttcactaagttcttatgctgcgtttttcagctccatcaggtcatttatgtttttctctacactggttattctagttagcaattcgtccaaccttttttcaaggttcttagctttcttgcattgggttagaacatgctcctttagcttggaggagtttgttattacccaccttctgaagcctacttctgtcaatttgtcaaactcattctctgtccagttttgttcccttgctgatgaggagttgtgatcctttgtaggagaagaagctgtctggtttttggaatttttagcctttctgcgctggtttctccccatctttgtggttttatctacctttggtctttgatgttggtgacctatggatggggttttggtgtggatgtcctttttattgatgttgatgctattcctttctgtttgttaattttccttctaacagtcagacccctcagctgcaggtcttttggagtttcttggaggtcctctccagaccttgtttgccaggtatcaccagcggaggctgcggaacagcaaatattgctgcctgatccttcctctggaagcttcgtcctagaggttcacctgccagatgccagccagagctctcctgtatgaggtatctgtcagcccctactgggaggtatctcccagtcaggctacatggggtcagggacccagttgaggaggcagtctgtctgttatcagagctcgaacactctgctgggagaactactgctctcttcagagctgtcaggcagggacgtttaagtctgctgaagctgtgcccacagctgcgccttcccccaggttctctgtcccaggaagatgggggctttatctataagtccctgagtggggccgctgccttttgttcagagatgccctgcccacagaggtggaatctagagagacagttggccttgctgagctgtggtgggctccacccagttcgaacttccaagtggctttgtttacactgtgagcataataccgcctactgaagcctcagcaatggcagacacccctccctctgccaagctccagcatcccaagtcgatctcagactgctgcgctagccacgagaatttcaagccaatggatcttagtttgctaggctctgtgggcgtggaacctgctgagccaggcaccagagggaatctcctggtcttccggttgcgaagaccatgggaaaagtgcagtatctggggaggagtgtactgttccttctggtacagtctctcatggcttcccttggctgggaaagggaaatcccctgacccgttgagcttcctgggtgaggcagcaccccactctgcttcggctcaccctctgtgggctgcacccactgtccaatcagtcccagtgagatgaaccaggtacctcagttggaaatgcagaaatcacccatcttctgcatcagtctcgctgggagctgcagaccagagctgttcctattcagccatcttgctggaattcttgtttttttttgtttttttgttttttgagatggagtctcactctgtcacccaggttggagtgcaggagtgcagtggcatgatctcggctcactgcaacctccacctcccaggtttaagagattctcctgcctcagcctcccgagtagctgggactacagatgttgccaccacgccaggctaattttttgtatttttagtagagatggggtttcaccatgttagccaggatggtctcaatctcctatttacatacattataagtatataaaataattattcaaagtattccaaataaaagtagtgcctatttgggtggcagatgtggatgatttttattgtctttttgctccattttctcctttttctgcatcaattatgtataacatgtataattaaaaatgcttgacactcagaatcaagctgtatcaattcagaggttgatggcaacccccatttgctctgtctgctcagccttcacctgggtcttcatccttcttgccttgagacttatgctccctggcacactctgtaccctgggtccctccgatcatgctctggtgctcggggctgcatgttcctctgcccagtgaagcagaaccagagaaccagggcttgttggcagtggattagactctagaaacattgtaatcaggccccagcatatgtctttctgcttctctcatccaccttcctcccccatcttggtttttagcataaaataaatctcctttttgggtttgttcactcaccaaggttttggctggtcatctttgttaattacaactagcctgggagagtactttcttcctagtctgtaacactgtatattctgtaattttctgaatacttttaggccttatagtgagtatttatgtcaacatcaaaagcaataatggttccgtatgtaccaacttggaaaaagcggaaaatctattcatggagccagttactacttttatgaaaataagggttgtccagggtacaataatatatatattttttctttcacttactgtgtttgattatgggccagatgaagggtgggttggaaagtatgtttgtgttttagggttagagaacttgatgaaccagggaacaggtaataaggaaaggcattagttaagagcctctttccaactagttaatggactctttacatgagattgactgttttaagcaatgatcagtgaccttttggggagctttttttgttttgttttgacaggctgattctggctgcttagtttcaggaccaagaatttgaagcaacggaaaagagactttcagagctgtttgaacttgaactattttgtgtagatatgggaaagagtggtaaaatctgatgactaattttgaggcctcatggagatgggagctgaagctgagaaaattgtgtattggggaggcacaagagtaaaattccatttcttaattattttgtaactgaacaagacattgctgtttatttcctctcaacatgtcttccttgtgctgatttcttgcagacttctcaaatgagaagcatttgataccctggggttttggcttgctctcgacttcctccttcacttccagcctctggtgatagacttgtcttcctccacagcctctgctcagacctcccactccttcctgttgctgtggccccagctggctacagtggcctctgtggcccaaattgtatgggaacaattgcggactccaccacaagcatctttctttccagtctcttctcagtcttattgtggacttgccttctccagcgactctgaaaacacccacccttcttgactcacctggccccatggtcttttcaggctactacttctgacttacctgtccacatctcttctttatttgggcacatctagaaattcatatgctccatgcccttactggacttcgccttctttctctaaccccacagtgtgaaatcacttcatatttcatctacttcaatcatgctgtacatctgcatggaaaaggcagagagctattaagagagaggtcttgggcaggttaatgggattttatggggaccttttataattctacgtgggattggaacagcaactatggattaaagggcattgcattcattgtttgtgggttttcctattaaagtgagtcaccacctttttaatctttttcaaataaaacaaggcctatgtttacatgaggatgctaattaaggacccaccactttagtaaggcatatttaatgtaaaagaaaaataacgtgaaaaagaaaaggtaggagtcaattatgtgaggaataagtgactctgatgtgtttacaatttactaagatttgttatgcaaagagaatattgccttgttctctctcatcctattgtttctagtgacttggggctgcttttgagaacatttactggagagatatgaactaagtgcttgtctgttttgacaaggtacttattaccaaataggaacccgctgatcctgatcatagattgcagttttgattgtagatagcgcacatgtttcctacaagctttgctgatcaccattgctcatcttctcagccttttattaagagataggagaaagcagactgttggcttccttggacagatggaagcctagttgacatgaagttggggaattcctgatcctctgccaaattaacatttatgaatcatgttggcttcaatctctgacaaccaatatgatttggcagctggaaactgaaatgcacactccttatggaaggggtgttgactttagcagtgtccgacacatgtgcagccaagatgactgatgtttatttgcttctatagtcctcaaggctcaaggcacatgacacagttttgatagctgtccagtgcatggctctgaaatgctgcaaactcctgggcaagctgctgagttctgctcagaagctttaccataagtaggtgaatgcatgcaagatctagttctcagttgtatcaggagtttctgtgggcatcacttttttgtttttttgttttttgtttttttgagatggagtcttgcactgttgcccgggctgcaatggcacgatcttggctcactgcaacctctgcctcctgggttcaagcaattcttctgcctcagcctcccaagtagctgggattataggcttccaccaccatgcctggctaattttttttatttttagtagagacggggtttcaccatgttggacaggctggtctcgaactcctgacctcatgatctgcccaccttggcttcacaaagtgctgggattataggtgtgagccaccgcacccggccgggcatcacttttgcctgaattccagcatgaaatggtcattgtgctgtatactaccctacatcctccctaactgagacagtgacagttttcaatctgggctgtgtcagcagccaaactagataacttaaaagcaacacagtaaggatcaaattgtcttcaattcatgagacaattcgttttccagttttgacaggtataggtatttattggggaatttttaaaatatatgttaggcatgttctaggtactgggaatccagccatgaaataacataggcaagtgtccctcctgcatggagcttacactttagtagtgaagacaaataataaacaaatgagcaaatgagacaacttcaaatagtgataaatatgctaggaagaaaatacaacagcctaatttattattattattatttttgagatgaagtcttgctctgtcgcccgggctggagtgtactggtgtaatcttggctcactgcaaccttcatctcctgggttcgagtgattctcatgcctcagcctcctgagtagctgggactacaggcatgcactgccacactcagctaatttttgtatttttagtatagatggggttttgccatgttgacctttccccactttatgtttttgtttgctttgtcaaagatcagttggctgtaagtatttgagtttatttctgggttctctattctgttctgttgatctatactagtacctgcttttatactagtaccatgctgttttggtaactatggccttatggtatagtttgaaattggataatgtgatgcctccagatttgttctttttgcttagtcttgctttggctatgtggactgttttttgatttcatatgaagcttagaattatttttctaattctgtgaagaataatggtggtattttgatgggcattgcattgaatttgtagattgcttttggcagtatggtcattatcacaatattgattctacccatccatgagcatgggatgtgtttccatttctttgtgtcatctatgatttctctgagcagtgttttgtagttttccttgtagtggtctttcacctccttggttaggtatattcctaaggttttgttttttttgttttttgtttttgcagctattgtaaaaggggttgagttcttgatttgattatcagcttggtagctgttggtgtacagaagagctactgatttgtgtacattagttttgtgtctggaaactttgctgagttcttttatcagttctaggagctttctgaaggagtctttagggttttcgaggtaaacaatcatatcatcagcaaacagtgacagtttgacttcttcttcactgatttggatgtgctttatttctttttcttgtctgatttctctggctaggacttccagtactatgttgaagaggagtggtgagagtggacatccttgttccagttctcagcaggaatgctttcaacttttccccacttagtataatgttggctgtgggtttgtcatagatggattttattacattgaggaatgtcccttgtatgccgattttgctgaggattttaatcataaaaggatgccggattttgtcgaatgcttttttttcatctattgatatgaccatgtgatttttgtttttaattctgtttatgcggtgtatcacatttattggcttgcatatgttaaaccatccctacattcacactcctgctatgaaaaccacttgatcatggtggattatctttttgatatgttgttggattcagttagctagtattttgttaaggcttttagcatctatattcatcagggatattagcctgtagttttctttttttgttatgtcctttcctggttttagtattagggtgatactggcttcatagaatgatttagggagggttccctatttctctatcttgtggaatagtgtcaacaggattggtaccaattcttctttgaatgtatggtagaatcctgctgtgaatccctctggtcctggacttttttttgttggtatttttaaaattaccatttcaatcttgctgcttgttattggtgggtttctaattcttcctgctttgagctaggaggttgtatctttccaggaatttatccatctcctctaggttttctagtttatgcccataaaggtattcataatagccttgaatgatcttttgtatttctgtagtgtcagttgtaatatttcccattttgtttcttatcgagcttatttggattttctctcttcttttcttggttaatcttagtaatggtctaacaatttcatttatcttttcagagaaccatccttttgttttatttatctttcgtattttttttgtttcaatttcatttagttctgctctgatcttggttatttcctttcttctgctgggtttgggtttggtttgttcttgtttctctagttccttgaggtgtgaccttagattgtctgtttgtgctcttttagactttttgatgtaggcatttagggctatgaactttcctcttagcactgactttgctgtatcccagaggttttgataggttgtgtcactattgtcattcagttcaaataactttttaatttctatcttgatttcattttgacctgatgatcattcaggagcagattatttaatttccttgtatttgcaggatctgggctcaccgtaacctccacctcccaggttcaagtgattctcctgcctcagcctcccgagtagctgggattacaggcacacaccaccacacccagctaattttgtatttttagtagagacgagcgttctccatgttggtcaggctggtcttgaactcctgacctcaggtgatccacccatctcggcctgccaaagggccaggattacaggcaagagccaccgtgcccagcttgattgattttaataaataaaaatatttatttcattgatatcgctttttttgatttccttaaattgggctttgtctttctctggtgcctccctgattagcttaataactaaccttctgaattattttccaggtaaatcggggatttcttcttggtttggatccattgctggcaagctagtgtgattttttgggggatgttaaagagccttgttttgtcatattaccagagttggttttctggttccttctcatttgggtaggctctgtcagagggaagatctagggctgaaggctgttcacattcttttgccccatggggtgttccgttgatgtagtactctccccttttcctatagatgtggcttcctgagagccaagctgtagtgattgttatctctcttttggatctagccacccagcaagtctgccaggctccgggctggtacagggggttgtctgcacagaggcctatgatgtggagcgtctgtgggtctctcagacatggataccaccacagtatttggggtgtctcccaggtcctgcaggagcaatccacctccttcagagggtctgtgggtcctctcgggtttcctgatttattcctgcagtcattctggaacaaaaattcataatgcgagtctcctcaagctgttctgtctgcccgagtcggagctgcaaaaactctctgatcatgactgccctttctatttcttaacattttaaaatataatattccaggtgttttgtaaatattttacatacttgataaaaatgaggtcaaccatttgttgtttttcaacttcatttgttcatataatttttggaacacattccctttgtatctatatttcagccaattgtacataaacagggaatcattgttaatgtaattaatctcaatcaattgcactagaaatgtttccttctcttctcttctctttcaacacagtctctttttgttaaccaggctggagtgcagtggcatgatcggggctcaccacagccttgaccttctgggctcaagccatcttcccacctcacccccaccctctaccacccctaccctacccacctccgagtagctgggactacaggcacgcaccactacacttggctagatttttgtatttttagtagagtttgggtttcgccatgttgcccaggctagtcttgaacttgtgggctctgcctgccttggccttctaaagtgttgggattacaggtatgagccaccgcgcctggcccctactatctttatttttactagttataaagataagaattgtttcttgttaagttttcaaatagtacagacgtagataaaataattatacctacttctaactttatctcatgtagtttgtgtgcccttatgatttaagatattggaggtataattacatagtaacatacatacataaaatatagctctgagacctcagtaggaaatgttggtttatatcttattagaaagaatcctctttaatgaagatcgacttggccttaatgaaatcatgttgggtttttttttcctctttctgatctctacccctattaattctttaatcagtaactgcacagaggatagaaatagcatgatgaggatgtatgctagattggaagtcaggagacttgagtttaattctgttctgcctctcacctgctatgtaggtttagggagatttgagttccagaggccctaatacagtgctgtttcccccacaccatgtagaattcttcctctgtgctttccagttatccttttgtaccactgtgcttttatttttcatttgaaaagacctggtctttgagttcccagcaatttggtccaaaaaatatataatcacactagttcagttttaaaacatatacatttttgtttgtataaatagtatacgttaacctctgaatttctttgtttctacctgtattttttgagaataaataaaaaccaaaagaaacttgctttttaaatcaatctgatgtgtttgtagtgatatctcatgtgtgtatatgtgtttaattaatagactttatttcttagagcagttttaagtttacaaacagaaagtacagagttcccgtatactctgtgtctgcccccatatcccactctctggtttttcctgtcattaacatcttgacttggtgttgtacacatattacaactgatgaacgaataatgatactttattattaactaaagcctatactttacattcaggttcacacttttctcattgtgttttaaaactgtatttctctgattaaaaatgagcatcttttcatgtgttcattggccattgggtttccttttgtgtggattgcctgtcaaagtcctttttctattggagtgtctttttaataggagttccttttacattcttgataggagtcctatgttggttatacatgttgcagatatattcttccactctctgtcttgcttttttattgtcttaataacgtcttttgaaattattaattttaaggtagtcaaatgtgaaagtgttcttctcctttataattggagttctttgaaccctgttttagaattctttccatacctccaaatcatgaggatgttagctccttaaagcttaattattttgccttttcatatgcagttgtataatacacctgaaatcaacttttgtgaatggtgcaagattgagggctctgagttttttcagtaatttcattggacgctcaaatgtgggaaatgtttttatagcatttctttcatcatctatttccccttgttttcttagtttctgggactcctattaattgaatattaactcttctgaactaattcactagttttcctgttccttctaatagtctacatctttgtgttcttgtttactttatgggatagttcttcttctgatccttccattaaattttcaatttccacaattatattttaattccaagcattcttttttagtttccaaatgtttctttctttatagcctcctcttcttgttttatttatgcattatgttttcttgacctctctgaagatatttactgtagtttttttctttgaatttttctttcatgtccttgtatgttctttcatgccctgaattgtccatgtttcctctgaatttatttctttctcttcctaaagcccccatcccacttcttatgttaattgttataataattattagttatgttaataatttcctaattatatggtaatttcttaactatttgatgatctttggttgttcatttatttcagaatgagacattaagaagctgattagaaggaaggatttgtggattggccagttgcatgtagaatgagcagctctggttcaacttacaaatttttggctttacaatggtgccaaagaaatacacattcagtagaaactgtttttcacattttgatttttgatctttttttgagctagtgatatgtagtaagacaactttctcatgatgctggtcagaggcagcaagccacagctctgtcagccccacgatcatgatggtaaacaactggtactgtactctacagtgtactgtattcaatacattatgagatattctacacttaattataaaatagggtctgtgttaaatgagtttgcccaactacaggctaatttaaatttccgagcacatttaaagtaggctaggctaagctaggatggtcagtgggttaggtgtattaaatgcattttaacttgggatattttcagtttttgatggatgtatcaagatttaaccccatcataagtcaaggagcatctgtagtttctgagtaacactcccaagggttaataccttttctcttagcttggttagtttctccaaagacagttgtcagtgttttgcgtggtagctagaaacctggttcctagtgtgatgtttgtttgtttgtttgtttgttttttgagagacggagtcttgctctgtggcccaggctggagtgcagtggcggatctcggcttactgcaacctccgcctcctaggttcaagcaattctcctgtctcagcttcccaagcagctgggactacaggcgcacaccaccactaccaggtaatttttgtattttttagtagagacggggtttcactatatgttggccaggctgctctcaaactcctgacctcaggtgatctgcccacctcgacctcccaaagtgctgggattacaggggcatgagccactatgcccggccagttcctagtgtttttagagtaatatagggccagagttgtgggacagggcatttcaccattcagtatgatattcatttaatcctcttgtttttgtgtggtgctctgccttcccttgctacttccgctgtatctgctatctccaagaacagtatgtagcatttccacagactaaataccagttttcttccagggaggggaaggctaattgtctgaggggtgggaacttctacaaactttccatcagtcctatttttagcttcattcccacacttgctgtctttagaaatcttctgttccttcattcctgagtctttctgggattctgcagtttggcttccttcttaccgtctcccttccatgttggattaggtttcagtgttctctgttttgctaaatcagatcccatctgttcattcactttccggcttccaaaatgtgtttgacatcttttgtttgctattatgttctctcctgttctctttatccttgtggtttatttcctttgattcctttaccaccagcaatgttttaggaggagagataaacatgcgtgctcaatctgctgtacaaaattggaagctgaatgtaccacagcttacccaactgattccctgctaatggaaacatattccaatgttttgtagttacaaataatgctaatgcattcttatatgagcatatttgagcatttggggagtgttaactataagacagattcctaaatgtagaagcattgggtcagaagttgagtacgtttgaaacttactgccaaatgtcactccaaaacaattgaaccggttaatactgctgtcaacagtgtgtatgaaataaagcacgtttttattaatgaactagctacgtgtcctttttgatgctggaccaatgggtttctttgcttgatttaaaacatttcctctatttaataatcttggctgacactttcgtgttagataattgaaaaactcaatactaaacattactgtattatagttcttcaagaagaaatatagcgtgggggattaaattagtttaccaacaggaatggggccaatatgattacttcagttttctttatttctaatatgtattgtggctcacaatccttcaatttcacaggcttctagaacttttaacattagaggaactgatgatcgatttttttttatagtttgctttgacaaaattaccttggtaggaacctttcatttatctgcttaatgatacacactcattctttttatcaccctgcttctgacacagctcctggcccatttgtttatttaggtacttgggcaaaagagataaaaatgcatttgtttaggcctgtaaaacactggtagtataactatatggaaaggggagccaatccgaggaaggaagaggagctatggactgggagtttgacagctctcttagcttacattctggctcagccacatatttctatgtgatcttggacaatcatataagccctgaccatatttataagacaagaataacagtgactttaaaaagtaggactttagggtgcaagtgacagacattaaactcagggtgacaaaaagtaaaaagcgaattcatttgggaggccaaagtgggcggattacctgaggttgggagttcaagaccagcctgaccgccatggagaaacctcgtctctactaataatacaaaaattagccgggcatagtgacacatgcctgtaatcccagctacttgggaggcagaggcatgagaatcgctaacacccaggaggcggaggttgcagtgagctgagattgggccattgcactccagcctgggcaacaagagtgaaactccttctcagaccaaaaaaaaaaaaaaagaaagaaaaaaggtgaattcatttatttacttaacagagaacctcaagggtgggatttagatatagctgagttcaaatgtttaaacaatttcagcaacacgtatttcttgaactctttcctaggctggcttagtaaagagaaaaatggccacctgcagctcactgttggcatgctgtgacttgggaaccccatgaaaagaagccacatcttccttgttgttctagcaaatgtcttatttggtgactcttatgggtctagcctggttcataagtctctgaatgagtcatgcctctgattggccaggcctccccaggaggagataggttcaagacgcttgaactgagaatgggaatactgaggtgttgtttcctaaaggaaagggcatagatgttgggtagacaaaggcaggagatgactattaaccttctctacctttcatactagattggtctgagtcttagaaagagtaatatttgtgaatataaactccatggtgctatacaacaaatgtagattgtcttttttatcttatgaatacttaattatgacttagttcagacttgcccaaataaattacttgccatgtcggcaccatcgcactcttgtgtttttagtagagactaaaaatactcttgtattttaagtagagacggggtttctccacgtttatcaggctggtctcgaactcctgacctcaggtgcctcaggtgatccgcccgcctcagcctcccaaagtgttgggattacaggtgtgagccactgcgcccagctacttatagctattttttttttacaagtccttttaagcataggtgagttgtccccattcttgttcctaaaaaactgctcttatctcgggcgacatataaaagggaagatcaaaaataacctttagtggataattatatacatttatcaccatccttgtagtgtcatgtttaaaatgctttggccaatgaagtaataatcatggcagattattttatcttggtatctattggttgtgatcaattaacacatgcacagctttaaaatattgaaattgatcttttgtttgtttgtaaaacaaatgacatcataaacaaatgaagccagcgggagaacattgatatcatgtcagtctcaaaggtgacaacatcttctgaatatttcctcctcgtcataacttattttgatattatccatgaattgatctaaacttttccataatctatttatacttaagttggtattgcctctggagatgacttgcatacttttttttatagctcctgtctatatgtttttctcccttttgtgtatgtggtatggtgaagaagcatcatttgcagagtatagtaaaactgcagctttatttttcgacttctactttccctttaaaaattgttcagtgggaacagcctttccccatccctggatgaacacgtggacaggtcccatggctttctgctcattgttaggtaacagaccatcctctgggtcattttaagtcacaaacacagtctcaatttagaaattaaaatatctaattcacacacatgataaaaacttagaatttagttttaatgtcaattcttacctcctcccccaggcagggccactataaaattgtctgtttgtagtgggagaaggaggcatgattctttcctctttccagcttaatgttttttctttcccagctttctggaattaatttaaaaaaaaaaaaactcctctagggtctggctcagtgggagaagagattaggaaaatagggcacaatcttacttggtatgcgcacttgttaactttttatgtagtaggtgattttatgttttgttttgttttttgttttttgtttttatttttatttttttatggaggctccctgcttgtccttctaggcacacacctgtgaggcatgtagtatatctcttttgcctggttgcaactcagctcctggttctcttgtggttatggacctttactgttagaaaaccatcccctctgccagcaggccctcttgggcaggattataatggctccaggcagctctttccccagaaagctctgtaactggctcatgagaaactgacgcatcttttgcctcatggagagtgggggtggtagtatagttgctattcatgggagaagtcatgtaataaaataagaaatatgtatttggctgcctaaaactcttggaatttcataagtgttaatatgagtgataggggcatcttttgttatagtatttggtttttgtctccagttcttgaaatagctctggagtgagagaattgtcttttgttattcataacaagctaacttcatccagcctgagcttttgttaatgagatgatttttgaaaaggccctaaagatgggagactgcttgtcccatgactaaagggttggactttcagcaactgctcccactacctccaggagtagagaggggccgaaggttgagtttatctgaaatggtcaatgatttaaccaatcatgctaacttaatgaagctgccataaaaaccctaactgaagggattcagagagcttttgggttggtgaacacatggagttgctaggagggtgggatgcatagaagctctgcgttcccaatcccggccccccataccttgccttatgcttctcttccatatgattgttcctgagctgtatcctttataatataccagtaaacataagtaaagatttttccctgagttctgtgagtaattaaagcaaagtattgagggggttgtgggaacccttgatttatagctggtccatcagaagttagaagggaggcccagacttgtgactggtatctgaagtggggcagtcttgtgagaccgagccccttaacttgtgggatctgacactaactcaggcagatagcatcagagttgagttgaattgttagacatggagttggtattggaggatttgaaaatcacagagtactgttttacatataaaccgacatgacctcctccaggagttgccagcaagttctgagatttgattgcaagtccaggttcactgttatctgctcatcatgattttacaatcttcaggctcatccatctttgactcatttctttgcctattgaagaaaagccctacttttacattcctcttcatataaagacccttcataccttgagtcactatagttatctatctttgacccttcagaaattgttatagtttttttgattttcaagtgaacagagtttatgtagcattatggatgctaatgttttacacaggagaaatacattgttcagtttgttcctatttccccttgatgatgactagtgactataatgacttttttgatcctcaaaggacattagacatatctttaggaaccagtcagcattaatttttataccttttttcatcatatttgaaataacagaccttattatgtgtttacaggtataaacacatgtaataaaatattgactcaaaaatatagtgtaaaatatattccaaatgatattatccctttaaaagtattcaccttaggtttttaaggtcaagctgtcatagttcacagtttttaagatctcatttaaaaaattactttaaggactggcacggtggctcatgcctataatcccagcactttgggaggcaaaggtaggtggattgcttgagtacagacgttgaacaccagcctgggtaacatggggagagcccgtctctacaaaaagcacacaaaaagttagccgggtacagtggcatgagtctgtagtcccaggtaatcgggaggttgaggtggaagaatccttgagcccgggagacagaggttgcagtgagcctagatctcgccattgcactccagcctgggtgacagagtgagaccctgtctcaaaaataaataaaataaaataaaataaagtaaaataagtttaaatctttagtatataaagaataatcctcagcagtggccaatctccaagaaggtgaatatgatttttggaaacatcaaaaagccattgtgaaccaagtctaatgtgtgatattcacgaccaaattgggcagtaacgttggggtcaaaatagcattaatatgtctatgaaatggtgagcttggttttcttatttaaatgattgagccgtgaaaacaataacagtagtaatttcaaagatttttcccaatggttatgtgttataatatgcccacatttctagagatgattacttaaaagtaaaatgtacaagtacaaaaaatatgatcaccttttctttcatcatgaaagaactctccctgaagctgtacactggctagctctgataaagccactccccagtcgtttcctgatacgtcagttttctttttgactcttgtcatacaacatcctggacttatcctgatattatgcagaatattcctaaccagatctcaatatctctgtgcatagcatctgtctagtttacaaggagctctctgcatcctaggctctatccttcttcctaacatcttttacaaggttaggggttggtccttcgggaatcccccaaactgctcagagaggagccatctacagatttctaaggcatcatttggtgggaaactgttactattgtcagttagtcgttgctgctgcttttatcctaggcataggcattggagtgacccaatatattaaagctaacttatttgaggttcactgaacctctcccatagcctatcaattagagtgtgaggcagtttgtttcctaagtccttattagcactcctataggcatggaattaattcagaaaggaaaatgaaattctgctgtgcaaggtgtggtaccatgctgctgagttccaccaacaaagagctggcatccacatcctcttccaaatgaccataatgcatgtgacttccttagcactgaccacaaatcagtgctgaaaaaatagtagctgctattcattctttaaaaagttcctcaaaaaaccttccttatgattaagggatttttttgatggatcttttaaaaaaatttctgtagactcagggaatacatgtgcaggtttcttatatggatatattgagtaatggtaaggtttgggcttctagtgtgtcccatccttgttgctgcagaaacatgatttcactcttttttctggctatgtagtattccatgattttatatatgtgtatatatagataaataatatgtattatacatacacatatatatttaatatatattaatatggtataataaatgtgtgtgtgtatatatatatatatatatatatatatatatacacacacaccacattttctttatccaatcatctgttgatggacacttggattgattctgtgactttactattgtgaatagtgctgtaacaaacatacaagtgcaggtgtctttttgacagagaaataacacttccttttttttttttttttttttgagacagaatcgctctgttgcccaggctggagtgcagtggcgtgatctcagctcacagcaaactctgcctcccaggttcaagccattcttgtgcctaagcctcctgagcagctggggctacaggcgcgcaccaccacgcccagctaattttttttttttttttgtatttttagtaaaagtggggtttctccatgttggccaggctggtctcgaactcctgacctcaggtgatccaccagcctcggacttccaaagtgttgggattacaggtgtgagccaccatacttggccaacaatttcttttcctttgggtaaatacccagtagtgtgattggtgggttgaatggtagttctatttttagttctttgagaaatctccatactgttttccatagaggttttattaacttacattcccaccgacaatgtatgagagttcccttttctccacatccttgccaacatctgttgttttttgactttttagtaatagccattctgataggtgtgagatggtacactatgatgatgttaatcttcagaattaaaaatttgagttctctttttgccacaccattctgggcatttcctttaaacacccaattaatgagttagatgtgatttccccttagagaaggcttgttgccttgcctcaggatggttgtgttcattcagaggaatctgaccctttgtatggaatccgcagagcccacagctttcttgtcagtcagccatagaagggattgctggggatcgtccttttgaagcactgcctattggaagtgaaagggtgtatgtttcgtcccatacttccaaattttctcctggagtgtcttttgacttcactggttgatttggtaccagcccacacatatctctctctgaacactgtatctgttgctttttgatctagaacctttgatttactaagcagaaaatcaactttttcctcaaagagtcacagttatctttattggaaaacaaaggagagaaaaagaaaaacaaggtatccaggacatccctttttctgtgatattcatttcctagtctttatttctatacttatttctacttatttcgtttttctctttttttctttctttcttttttcttttcttttctttcttttctttctttctttcttttctttctttctttctttctttctttctttctttctttctttctttctttctttctttctttttttttttttttgagacaaggtttcactctgtcacctaggctggagtacagtggcttgataatagctcattgtaattttgaattcctggattcaagggatcctccgacctcagtctcctgagtagctgggactacaggcacatgccactgtgtctgactaatttttttctatatttcgtagagaaggttctataacatgtcacagtcacatagtttacttatatatttgactctgtaaatttaatgatatttttatgaattctaagtctcctgactgagtgatggagcagggaggccaattctcaatctttgtggtctttttctttctttttttagataagaaaataagggagccatatggggcttttacatacaacctagatcatcctcagtaccaggcagtgagctcactgccttccaaccctgcaagacacgggtcatcttccccagagtatagaatagagaactgaggagcttattgatgaaaaactattttgactgattcccataaatgccagggatttctgcctcttcttttgttattttacatcttcagaaaatactgcttgttgaatgtacctaatcatggattttactgatagggcagaatttccactctgtcatgatggcttaccaaggaagtttatattcccaaaggtacttttcttatatgcatgaatttttataaggatgaattaggcttagtacagtcacagatatgtgagtctttattacaattgtatgtcctgatgcatctttcaaaactgttacctcttaaattaatttctttaacttccccagtgtgcacctactgatctacacacgctgctctcctttctgcacacaaacacactatgcttattggggcttctttgccctgactcatttcttctttcacctgcattgttcttcccctttccatgggcgtttctccaaatgccctctcagtctctgtgtttaatacactcttccccatgcctgaatccctcttcctgccatcctgagttgttctcccccaagcctatctcagatatctttggttgcaggtagcataaactcattaaactgctgttaggaaatggagaacttttgtggaatggtaagtggacgtgaagaacattggccataaaggacctcagggcacctggagcaggatgagccgttagatgtcataagcagctgagttcaggacctgggaagccattggagctaatgcaactcatttctccatctcacccttttgttgaagccacatagtttcttgctctaagtctatatcaggctttctcaaccttgtcactgttgacatttgggccagataattgcttttgtttttcaggatgtcctgtggaatgttcagcagcatccctggcctctgtgccctagatgccagtagcacaccctgattgtgacaaccaaatatgcctctatagacattgccaaatgtcctctggggagccaaattggccattgttgacaacgactgatccataggaaactgcttccttgttcccctggttctcggctgctctatatacaggcagaaggtggctcctcagccttgttgtgctgcacctcccagctccagcctgactcagttgcctactccaaagacatagaatctcagaatttgattcggtctttggattggttccttgggatgatgtgtagactcctggtacaatcggcagggccagggaggtgcagaacaggtagcacaaacgtggctgtcactcacctgccccagatcatgctggggagtggaatttcccttgtatctgagtgcatactccattaagtacctagtatttccaatttacataggaaaaattctaaaaatattttaaggaagcaatgccttcttagattatattgcacacaagtaaaacgtatgcaacttgtggagatggggcagtgcagtggttaagagcacaggcttcggagctacactgtctaggttcacattcatcatactgcatgccagctgtggcttggacagactatttattggatctctctttgcctcatttcctcacctacacaatggcagtgataataacaacagtaataataataattatcacttgtgtattactcactggatatgccaggtactgttttaagtgtgttaaattaatttactacgtacccacaactgtgagttgaaactcttttcagaaatccttaggacaagattttttgttatggtatggagagcagatatttgtaaccctctagcaggatctgagggagtatctggtaatcaatcataagatattctataatagaacataggaatattctactaaaagagatatatacgtagtttaggtcttgtcaccaaataattacactgtcaatatctgggaaaattatgggtttgttctcagaactttttggaattatacatttgtatatttatcttcattgtacagatggggaaaactgaagttcaaaaagacttagtaacttttttcttttgagacagtgtcttgctatgttgcccaggctggtcccaaactcctggccttaagagagccacccatgtcagcttcctgagtaggcggctgggattacactcatgtgccaccacacctgggttctgagacttagtaacatgaccaagtttacacagctagaaatgcagaagctgagatttgaactcagcatttggatgccaaaagactatgcacttgaccacagcattataatacatgtatcagagggtttttgtgagaattaaatgagtgaacatgtgtaaaaagcactaagaacaggcataatacacagtgaatgctatgtaagcattaattgttatcaggattttcttcttccgtttttttttttttgtttttttttttttttagaggcagcgtctcactatgttgccaaggctggagtgcagtggctgttcacaggcacgattataatgcactacagcctcaaagtcatggacttaagctatcctcctgccttagcctattaagtaggtggaactacaggcatgtgccactgtacccagacaattttcttcattttagagggttattgcaatttattattataatggttggcagggcagtgatgtattcaatttgataaggcagtgcttcccaacctctcttggggaggcagacctcaaaaatcatcatctttctaaaccacattggagtaaaccatgatgctgttactggccctggcgactctggggtatggccaccagaagatctgcccagctgcctcatgagctgagggtcctgttatggactcaatgtttgtgttcccaccaaattcatatgttgaagccctaaccctcaatgtgatgtatctggagatgggccctcaaaggaagtaattaaggttgaaggaggcccataagggtaggccatgataggactagtgtccttagaagagatgccagagaactcacaccccctctcctccagcacatgcacatgcactcaagaaaggccacgtgagcacattgcaaaaaaaaaggtggccatcttcaagccaggaagggagctgtccccagaaactgaatttgctgacaccttaatcgtggacttctagcttccagaactgagaaagtaaatttccgttttagccatccagtgtctggtattttgttatagcagctggagtagactaatacagattcatgtcacacctggagcccggctaagcaactaggaagctctggattaagaaggcatattgatgtgtttccttctacacaacatgatttcactctgctaaattttgtgggttttttcttcttttttcttggtctattctattagacatttttttttttttttagacagggtctcactcttgtcacccaggctgtagttcagtagtgtgatcttgtctcattgcaacctctacctcacaggctcaaggatcctcccacctcagcttccctagtagctgggactacaggcccacgccactgtgcctgggaatttttttttgtattttttgtagagacagggtcttgctatgttgcccaggctgttctcaaactccttggttcaagcaatttgcccacctcagcctccccaagtgctgggattataggcgtgagccatcacacccggcatctattagactcttaactatgacttctcatccttggttatacattgaccatgatactgttttctgccacactgtgattaaaatttattattgatggatctaaaacccatgacctcaaacttgttagtgtagagtacattgtaaaaatacattgactacactggcctttggaatgcttctaagaatatatgttaactttgtaccatagtctgtagctatactttagcctttttttcttttcttcttcttttttttttttttttggtgtattcttgagaaatgataatccaaagtaaactgaatttgtactatttgacactctattctaagtgaggagtatggatttaagacacaaatcattaagtacagactaaattgtacttttcaatcttttagatgattaattatttttcgaaattcaaaaaatttattttctctgtttgggctatttcattcaaagattctaaaactattcagcgtaactcatgcctttacttatttttatcctgaaaatattaacttgtttttctcctagcttccggtgaagacaattttatcattgtcagcattctctcaagaagtttatgaaagaaaaagagaatgatttcctcatgcgagcctgaaatgccatgagaaagaacattgcattctcattctgtgtagtgcagttgtcctaaagtggactttttcattccatgttatttagtcatcaaatgttgcatcactttgtaaaaggaaaacaatttttgaaagttatagtgaaaaaccatgctggaatacatttttttttgttttacacacacacacacacacacacacactctctctctctctcacacacacacacacacacacaagaaaaaaaaaacagtgtcaattagatagtagccaaccttaaaaaaatagtcatacagtttatctatccatcaatagattcttgtttttggcttcttgggcagataaaaagtgagggggaaacttttaatctgtgtatgagagtagtcccaaaagcaaaactctcaggtattagtggaatgataaaatctcaataagtttaaataaagagagcaaacctaaacatatatatatagacaaatgtcaactacgccaagtatatagacaagcggatgtgaactgatgttaaatggaaaaaaaaatgtacacacttagttgccactatgtacaagtggttttattactttgtataaaaagagcatgagtattccaggaaattcagaaaatacaggaagagctcattcattatctcagtttcctcacacagctattttctattttggtgcattcatttcttattttgtccttatgcatatgtatttctacagttgtactcatagcacatacattttgtgttctgatttagagttaatatcccaacatagatgggcatttttgtgtgctgatacagtcctcagagctgtcatttatagaggcttttaatagttcagggattggacatagcatttgtgtacaacttaggaaaaatcattaaaaaggaaagaacgtagacacagatatttagtatacagatatttgtctgtaaagaatttcggtggaagttcaaaataaagaatcaactaaatactgcaaagaagtgaaaattagtttaaatgttcaagaaacatggcatttcttggatttatagttctccctcttattttcattttgccagtcttcctcactccatttaactcttttgtgttgtctgcatagcataagggaaaattgacttggaaagatgaagacactgggtctgttttccttttgatactccaagaaaagaaatatgtgtgtacttttagtgatgattaagctatatatttactaattttctaatcatgttactatttgatctagtaactggtatatgtaataacttagttaagcatttttttgtacctactatatgctcctgtatagctactgtagtgaacagtctcttactttttagtttggaaaattattgaaagaaatcaatgaagatgaaaaatgtatttgctggtattatatagaaagaaattagtatttgttaatatgtgaatatttaataggtatcagatgcttttacatgtattttgccatttaaccctcattaaagccccctttaaaaggaaatattcactgcaatgtacacagcaggacagattcagaaagctaagttgcatgtcaaaatcacagagctagtaattatcagagtagagtttccaagccagatatgtctgacctcatgccaagggcactgttccatgtgcttcaaaatgtaatgtggtattcatatttgcagcagttttaatggcctcaaagagtagtagtataactgagggtggagtgggatggcaaaaaaaccctggaattattgagagaggggtgtcctgtcagaggaatgtgggtttcttttttatttttaaagatctttttctgagccatgttgtgttactatttacagctgcatcatgacctaaagggcctcttataagcctccttctcagataaattatctttcagaacatttttcacacccagcctcaggagacatgtaaatgcctctatgtaaagtctttggatagagaatggtgatagagcttcttttgcagtttatgaagttctacttgatataactattattctccaacactatcgtgatatataaatcataataatcacaggatattgaaattttaagttttttatcccttatgtaaggctcatggaggcagtctataataacaatagtagtaatagctaacatttatttgaatgcttactgtggacaggacctatgctttgtgatataatatgggttacctcatttcattttctcaacaactccgtggggtaggagttgggatttgaaaggaccaatacaaaacattcatattttccctaagttctaagccaatttagaggtagaaacaggaattaaacagatgaagatcaaaatgccaccctaaaggctaataatactgatagttaaggcacgaggcttaggacaactagccaagtagggttgcaatactttgctcatgaaaaggagccaagttgtagtcactgtcagctcttaaacaaccacaggcctccttgcaagggcatcttcccctattttacttatagcacagaattgctgaggaagataagcttctctacaaataggcagatcccacatgaaaaaaaaaaagagaaagagtgtgaggtgagtgtaggcaatgatttctcccaaggaaacagataagcaacccctcttacagcgaaaagtgaggagaaggagaagagccaggagtgttaaatctactggagtctccaccccacaggatcatggaaaaggaggtctttgtccccagctgtaggtactaaacatgcggctatcctgcagataaggaatgaggcactgagacactaagtgacagttcactattagtaagtggcagagaagtctaaataaggtcagtccataagtaagaggtagagtcagggctgaacaagccaggctaggacgggctcaggctcagttcaggaacaaggcaatggaaaattaagatgggagggcagatgtgaaagggattacaaaaaataagtgataagagttggattcacttgtaatgagagttgggatagagtcaaaatgactcaaagcttttagcatttctagttggaaacaatgagagcattaagaaaacagtgtttccaggagtgaatagccagtgtttttggacatgagagtttgaggtaccctgcagactattggaaatttgagtctgtaacttgggagaaagatcggaagcagagatgcagattttatagttgtccatttaaataaaggtgataggtggctgaaactaagggaatgcttaagtctgagcagtgaaagaggaagttggtttcacagatgagtttcatctttgaaatacactaaaagatttgagttggtaaacatcagcaacttgatctagtttaaaggcaaagcccagcgtgagctcaggacttgacttcacctttttaccatagccctagaatgctgcaaggcaagcttacggatcacactggtatgcaacacagtttttgtttccccctgcaggttcactgtccatcccacttccaccctgttctctgacctgggaggctgaaaacatttatggactgcatcagttgggctcccattgggttcaattacctctgagacttggaatgcaggagtaggtgtggctgatgtgtttacctccttggttctttcactgtcagatcctgtggactgactgcttcccttcaacagggactttctacgtcaactctccaagattctagtaactgctctctccctctgcccccttaagtctagaggtggtaatagtttcccactgttactagacccaaggcactccacttcctttattaagttctacttgatgtaactgttattctccaacactatcatgatatagtgttgttagatattattaacactgcttatacctttataaacaatgtctttattgaagtcttcccttcccagttccttaaataatatacccagtaaaccagaaagaactcatgttctccaaggcacaagtcctactcttaataaacagagggacttcatcggggtgggggtgggggcgggggcagggcaggggccggtctcagaactgggagggaacaatagacttagtacagagactgtaaatccatatgtacatataatattgttggtggacagaatatcttacacagttacatgattcttcaaatgtgtaagtgccttagtgattcataagaaaatttatttgaaaattcatcaaatttattttacttattgtctttatacagattcttaactaacaaatggcttatggcttatattaagaatataactattgctgtgtttggctaaggacatctttttttttttttttttttttttttgagacagagttttgctcttgttgcccaggctcaagtgcaatggcacaatctcggctcaacgcaacctcctcctcctgggttcaagtgattctcctgcctcagcctcccgagtagctgggattacagacatgcaccaccacgcccagctaattttgtatttttagtagagatggggttcctccatgttggtcaggctggtcttgaactcttgacctcaagtgatccgcccacctcggcctcccaaagtgctgggattacaggcgtgagccactgcgcctgggctggacatgtttttaaatgtacagactgtactcacatgcaaagaatctgggaattacttccaaggactttgttaaaagttcatcaaactttcttcggttccaaactagagggaggtggaatgaactggtttaacaatatctatttctatcaggataggaacaaaaacgaccatccgtatcttgaaggaatttttgtaaaatcatttctaactcatttcacagcagaaattcaagcccccgtcttacaaaaaaatagtacaccacattctcagccttggcaacaccttgtcctttgtgtgacctgctgtggctcaagcagtgagcagagtctacagaacacaaaaataaacatctctacaggcctgtggaatgtgatggccagcgtgatgtggggcagactgtgggccgagtgccaggccctgtaggtgagccctcctgcggcccactttgcaaaagcagaaagaaggggcaaatctgccagtgaatttctgtttccacctttggcctggtctggggtcagggcctaggtatgtgcccagagagatgtagtcagttagggttctatgaccccagtgctgggaaggctggttatggtggataaaaagatcaaagaaagggtttcttgttaccattcttcaagctccgtgtaccatttccccatgtaatttgagaaattatcctgaaccagagaactgggaagtttgttcagtaactgcttattgagtccctgttctctcccaggcatgatcctaggcactggagatagtggggagtgggagcctccagggtccctcctcttagggatctcacactctgagtgcagaactatgttcttctgcctgcactcctacaaacaccagttctccgtagtactccatgacatgaggggttaatttctagctgactgaaataatggactcattgcccctcccatttcaacagcatggcggatggcagcgattacagagtgaaggaaatatcgtggtatggagagcagcactgttctcaataataggctctctgatgacgaacaaaaagactctgtgaaatgcatctcaaactcccaggttctcctttacagccaagatgcctccgatataatctgacttaatgatgccatactctgtaacagagtacaaaattagaataaaagagttatacaaggcactgagttagacacaaaaatttattcatggaactacacaagtattgagcaccgactttatgccagacactacacccaatgttataccagaaccctattactgcagaaaatgtagttgggggcaagcttctggttatgaattgcacattcaaccactcagaagtaagcatttttctgatgttgcctagaatcggtggctctgtggattaggaactgaaagggtgggaaagaattttgctttctactgtctgcctcgtatgtgaatcacgagttgtacctttttcttcctttctgtagaccaaataccatataaatcactctgctgtttattctaagtcttatgtaaagtgttcctgtcctcaaagcatcacacacaatgtagaggctttggcagtttctttagcaaaggtcagtgtttcagtttagtgcccaaaggtctctgacaaacatccaaaaatttctggttgaagtcagtaattatttactcccgttaccaggatttgtttgaggactaagcagagagaagcagaaaggaaaaataagcacatcaaaaaaagcagtcttagtctctcttcacctagaacattatatatgtattgtctcatggcacatgtgtaatgtcagtaaacaataaaaataaataaatcaatttccagttgaaggcatctccaggatccagaggctctaagtggatgaaaacaattgggtgcttgggccagagactgtgcaagcctaagcagagagagaggggtttcttaacttccctcccacgttcagtccctttggaactcgagtttgcccctaggatagaagtctgtaaggctaccagctggaaccctttgctacactgctgtaaaggctgtgcagaaaaaaatgttggaattctctcatacttggaaaattaccctttaatacacatggtttcctctctgtttcctagccataggccaggatgttaactggggtggggtagaggcagacatttaattcttgttaagagggagtaataaaatgtgaagtgatagggagccaatctatcgttttctgaatatccacaagaggcttacatttagcaacaacatttagcaaacacatgtcaggcactgtttagttgctggggacacaacatccaacatgacagttatggcttctaccaagacgcagcttaaaggccagggagaggcaatggtttgcggtgaataagagcacaagctttgaaatcagacctgaggtagaatcttggatagagcattccttactttgtctgtaaaatggagattataatacctacgtcacagggtcaagatgaagataacatggaataacatatatgtagcagtgaattcagagcctggtggattcagtgcccctaaatagtaataatcattgttactgttattactttgtggcttattctgtgttccaagagtcagacacttgagctctgagtgctggctggtacctccgtgacatgaatgccacactctggtgtgcgctgtttagagagaagctggttgtgttaaatactgttcgttttctagttataatggttgattttcttgctttgtgaagattagacctctctgatgaagataaagtgctttccatgtttctttcagctgaatggccatttaaaaactagtgacagttatttacacttttatttcttatgacttgagggggttctccctggtgaaggcagaacttatttcattcatttattaggcgtagagtaagctcttattctgaaccaggcagtgtgtttgggtgcgtgtgtgtgcatgcatgtattttgtttgggtttgggtaaggtgagaggaattgggggaagatgcaaaggtgacttgctctgggagttaaacagtctagtgggagacagagagaaaggtaaatagataacaagaatgtatttgataagtgccaggaaaggcatacacagagatctccaaaaacctggaagagggagatgcctgttttaaggcatagaagcagtggaatcaggagtgataggtaattcaggtggggaagtgtggaagaaaggaatttgaaggtaaaatgaatagcatgtaaaaagatataaagcctgagtttttcagtgagttgaaagaaatttatagtattataggataggtgggtatggtagtgatgggctaggagtgaggctgatatttggctaaggagatgatcatatttatgggctgaacgtggcttctgctgaggacttcaaggaccagccaatcctcaggcaaacagattatggctgaggacactgagtttccatgattagaaatattatctgtgtgtttccctcttgcttctctacagagacaggagtgagtgtgtagatcaaagagcttcaaatgggacacattaagggttacaaaggtaccctaaaagagtacctccccactgcagaggtaatagtagagttcatttagaaatcttctctagtgagttgcggtagggttgaaacttactcgtaaaacaatatagatacgaaaaaaattacaacttgtttgttgctataataaatgtaaacttcttcataagcctccattttaaatgaaggcaagagtggggagtttattttgctgcttttgtcctctctaaaaaacctttgcctattcccaagttataaagatttttttccctctgttttcttccataagttgtatagttttcttttacgtttacatgttctatctataggtttggtataaatggagtgacaataagagtcaagattcatttttccccatgtgaataaatgtgtaggtctgtatctgaactttctattccgttccactaatataatgtgccaatatcacactgttttgattactctggttttagaacaagtcttgaaatcagttaatgtaagtcttcaacctttgttctttcttttaaaaatattttggcttttctaggtcatttgcagttccatatagattttagaatcagcttgtcagtttccattaaaaaaaaaaaaaagactgctgaggccaggtgtagtgacttatgcctgtaatcccagcactttgggaggccgaagcaggagaatcgcttgagcccaaaagtttgagaccagcctgagaaacatagtgaaacctcatctctacaaaaaaatacaaaaattggttagatgtggtggtatgtgcctgtagtcccagctgtttgggttgccgaggtggtagaatcacttgagcccaggaggtcaaacctgcagtgagccatgatagcgccactgcactctggcccaggtgacagagtgagatcctgtctcaagaaaataataaaaaagaaaaaaatttaaaagaaaaaatactgaccaggcacggtggctcacacctgtaatcctagcactctgggaggccaaggcaggtggatcccttgaggtcaggagttcgagactagcctggccaacatagtgaaatcccatcgctactaaaaatacaaaaattagctgggcatggttgtgggcacctggattcccagctactcgagaggctgaggcaggagaatcacttgaacctaggaggtggaggttatagtgagccgagatcgccccactgcactccagcctgggcaacacagcaagactccatctcaaaaaaaaaaaaaaaaaaaaaaagaaagaaaagaaaagaaaagaaaaaagaaagaagtaatgctgctggaattttgtttgggatttcactgaaactatcaactaacttaagtagatatgacatcttccaagtcttccaatctgtgaacagggtatctctctttctctcttttttaggcctttgtaaatttttcttattgctgttttattattacattattattaatgtaaaaataatgcacatgttgtgttgaatctatttcttggcatttcatattttttgaagctactgtaaagtggtatttaaaactttttaatttctaattattcactaatatagagaaatgcaatcaactacaaaagaaaaaataataaatttcaattcatcaaaattaatggcttctgctcttcaaaatacaccactaattaatgaataggtaagccacagagtgggagaaaatatttctaacacatatatccacaaataacttgtatctagaatatataaagtattcctgtatcccaataataaaaaacagaccacctagtaaaatataggcataatacttgaatagacacctcacaaaaaagatatatgaattgttaataattatatgaaaattggttaatataattagtcattggggaagtacaaattaaaactacaatgagataccatttgatatcactagaatgactgaaattaatcacaccataaataccaagtattgccaaagttgcgaagcaattggaactctaatttagtactgaaaatatcacacaaccacctttaaaaacaagtttggcacctccttctaaagttaaaatacacatttaccctatgattgagcaatttctttcctaggggtttactcaagagaatgaaaacatatgaccacaaaaagacttgtacactcatgttcatagaagttttattcataatgtaaaactggaaacagctgtaacaattatcaacaaacaaatgaataaactcattgtagtatatccataacacatagtaatattcagcaataaaaagaatcaactgtagatacacacaacaaactgaatgatttcaaaacattatcttgagtgaaagaggccagaagcaaaataatacatattgtttgattctatctttatgaaattcttgacagaattctatcttgacagaaagcaatctatattgacaactaatttatactgacagaaagcaaatcagtggtattctggtgccagggttggtgaagattgactgcaagggagcatgagggaatgtctggggatgataaaaatgttctttgtcttgattgtggtggttgtaattacataagtgatacatttgtcaaaactctgaaatgtaggcttaaaatgggcatgttttattgtatgtaagttatacctcaatttaaaaatgtttaacagtctttgcaaatttagtatttttcatctaagatcagctttctttggatattattcagccaaatctgaggttactctgattattagggttgtttctctcctctcttgtgtttattcctccttcttcatgagtgtgtctggtctaggggagagctcacgtgtccgtgtccttgtggtagtggtgggggaggtggttagcaagcaggccctctggttgttttctaagttctcattggtccatgcagaggttttcctagtattggttactgggcatcctgctggcctcctgaatgtgcatagaaagtgaaactcatcttggtgctctctaggagatggcttctgtcctcattgtgtactttgctgctgggaacttatggtttgtattctccatatggccagggcctggaggaattcccaacctttcttgttgtagttcttaagggtcaactatgatttccatctggcttagcacttttgccatggaatccctcttccctttgccatggccctggctcttatctcacctatcttccatgtctctattgagaacatgggggaatccccccatcacttctgtgccacctaggaggtgaaggacagtcagtgggcactctgtttctctctgcttagacagaggggacccctgaagttatgtcttcccacagttatacatgggacaaatagcacaggcctccttcttggcacttccccctcagctacctaggttaaagggaaactatctcttcaccatatcacatacctgtccttggtcaagacttagggagtgggaaacatagtccctaagaaacatgggcagctcatcacccttcctttaaaatccgtttccctttcctctcagggtaggcttctactttccctttctgtgtggtgggaatgtcccctataacacaatcccatgattccttgcctggggatgcatttattctggatggagcttatgtctcattccctacagcaataggcttcttgacttagtcttaatgacataagggaatatttaaaggaacctggcttaccagaaaggggcaatacaccagaagatttcttaaaaaatattacctatagtataggaatatttcagaaatgcctaaaaaaaggagactggcaaatttcatgattcttaagcaataacaaagaggaattgtctctaccttgaaagagttattatgtaaacaaagagtaaagttaattagagtttactgagagtgcttacctataccagttaacttacatattagggaagatgtagttagtagtcatctggtttagaagacagatatcagtaattcaacatcctgattttattaatgaggaaatagcagcaggaaggaagtgattcatacagggtcactgggactcagcccaaatgcccacccttggtatttttccatcatactctatctcttttgtggctacagacaaatttataaggtgagaatacagctaaaggtgaaggaaatagaaggagtcaaggaaggaaagaacaagggaaagccaatgttgggggccttccaaaacaagtggttctaggaatactcttccctttgttctagttgcttactgactataagaaatttgtaggtgttctagtgataaaagaaatatcttcagaaaactttactgtgggcaacataaaagagttgccccacaaatggagtgctttactgcgagtttactgaatgttagcaagaatttttgcaaatgatttttctaaagtaaagaggataaagtgaaattgagaatatatcccaacttgcactgtaaacagtaatcttagaagaacatcatcatgtagtaattctttcatctcagaaaatttttccgaagctagaatgggatgcagaatactgttccatttgatgagtaaaattcatcagtcgttgatgtcaaaataatatgaattggaggctgattagtaaaatgaagagttgcaagatggtaaatgcttcctttgcttatagttttaggctggggtgcagtggcgtgatctcagctcactgcaacctctgtcttctgggttcaagtgattctcatgcctcagccccccaagtagctgggattacggcatgcaccactacactcagctaatttttgtattttttatagaaatgggatttcgccatgttggccaggctggtctcaaactcctgacctcaagtgatcctcccaccttggcctccaaaagtgctgggattacaggtgtgagtcattgtgcccggctgcaatactattaacttaataaaagacctgcccattatatttgtctcttgtcaggtgggttaattatttacaagaatgctcaggttaatgttgtgggagaattgcagactgcttcaaagtctccaggaaacaaggtttgccatgtctaacctgcacatttcttctgaatatgtataaatctattaaatgacctgttttgaaagaaactcacatgcgttgttttgtgaacagccatataaccttgtgataaccttgtcggcttctccccccttccttttgtcgtggtcactcacatgaatggtgcttaagcgttagtattgcttggacatcttgttgacagaaacgccaataacaattttgaaatctcagagcagatggacaagtgcatcatccaaagtcagccaaagctacttgcctccatttacactcacatgcagtgttgtcaggggagtcctttcatttctctgagcttcagtttcaccattgagaaagagagaaagatagcatctatccctgaggatggtgaggatcgagtgcgcttattcatgagaaattgttagtaatagtattgcatacaaatgcttgcagagaggctctttctccccaccctggtgtcccatgaggatgttccttgtcctgtggttttacccaggttgactctgtgacttacaacagacctttgttcatcgtgctatcaccacagccatcttgggatgattatttaaattttttatttggatttatacaattgcattttttggatatcttctcaaatcagttcttaacttattacatgtggaaatgccaaacagaagatgctcacctaaaacaaatgaaaagggaatcgtgagtttagcagcagcaaagtaaaaattaatcatgcttaatatttttgtaaagaaacagaacattttattttgccaggggcttgttgcctacaatgtgtcctctactgaataatcacctcattttcaatgtgccatatcaataaatgatagttatttttagtccttgaaaaaccataaaaaagagacttttgtgctcaccaaaggaacagacctgaaatctctatttaagaaaattacatgtaaaatgatatttaacacagttttggaaatgaataataacttaatcataccagctcaattatattcctttttacatattcttcctactctttgtgacaattacaaacatacaacttttacataagctttacatagcttccctcacaaagtagatgagcgtctttttttggctttaatattgcatcgtaatagttttccatataacaatattagcttcctgtttataattgtaatgaattgcatactcttctatttgttgaacatgtcataattctccaaacacttcccggttgttaaacatttaggttgtttctgttttatatattattgttaatgcagctattattttttgcctatagtggcttctcttacattgttttcttaggataacctcccagaaatagaattgctattgaaagaatgtggatacctttctaattcatgatccatcacattatgttgctttttaaaagggctgttgcacagctctggctgtttcagtattctttcacagcatagggcggcactaataaggatggtccttatgccggatgtttatgggtaggtggatttatagtcttacactggaaaacaacttaaccttgggggttatttaaatggaaaagcctaagaagaagctaggactataccaaggcaggagtttctaagttgtgcctttttttactggtacaactgattgtatcacatcataacacttggcagttaattgtgtccaattggtgagttattccattgtgtgtgtttgtcacaggtgtaggtagactcttgaatgccggttctattggaattgagagaaagagagggtgctaggcataaaacataccataaacatgactcacgtggctgtttaagaagctttgatttatgttagcacagtatgggcagaagttgaaaatcttactgccccaggggcctggcaggtgaagcacgcaggaactgcacacaaatgtgtgtgcagttttaccctatcagggtactctatcagggatagggtaaaggggaagtgcaggacttgtctgaaaggggacactgctgcttggctccatctcatggctgccacaagggaatgcagcccagcatctttttagagcttgcaatttttcagaagaatctggaaatttggatagtatctgatatttacaagtgccaactaatgtaaacatttacaaaacactgtaggcgtaataaaattgtcctgaagcctgatttgcttgttgctgctggtttgtgggtgctctcatttgactataagtatgattctgtgaagtaggcagaaggtaattttttgtacaaacaagaaagctgaggcttagaaattattgttcaacagttcatgaactgtgcctgtcccactaggatgtgagcctcatgaaagcagggctattgtctcttttctgcaatgctcatagcccagctcctagaatagtttctagtgcatattggacactcaataaatatctattgaattaatgagtgatgaacaaatgaaaagaggttaaatcacatggcaaataatatctacatttttatgccagatattcctcatgttttatctcactttgatatatacaacattttgtgaaagtaaaattattacctccattttatggatcagtaaactgaggctcagagacataaagtaatttgcttgaattcatataactcttaagatgcagagtcagaacccagatcttccatctgggtattggctcattaactttgtcctcaaactagcttccttcatggttaagaagtggctgctatagatccaggtatcacatccagaatctacaggaagaagaggggcttgtttcttcctcatgtcttttcttaagaacagggaaacatttcccagaggacttctctccatagctcattggctggatacttcccgttctgtgcctcatcactcactgacatgggaacgggagaccaatccaaacccattccctaaaccaagggactgggcccagatggccactggaaagagcagatagagttgaatcctaacaaagccagggttatgatggaatagaggaagggacggactaccagctctgtcttctccagcaggctgtgtgtgaaagcaaaaatacaggtatggtagatcttttaaaataagagtttttccttgagtgtttcatcttggggaagaaagtagatgactgttaaagctacttattcatgacacaaagttatattttggaaaaacttattctgaagctccagagtgttaaggacacctttagagggttagttttgctctgaaatttcacagctggtcaagtcagtgacctacaagaatgtttcagggaaataccaatggtaccatttaaagaactgcatttatagctacgtcaggctgcaattcacatcatcctactggtgtgtcatcagcaagaattatgtgtataattagacaaaaacgtttatgaatttataccaaggaataaggaaatgtagtagaagcagtgcagggcattggttaggaagactggccttgcaatcagaccaaggttcatagcccatttctgctgcttcattatctaaaggtatctttaatcttgtaaggattaaatgagatgctgtctgtagtgatgcttgctagcagcttggcctatggcaagtgttttgtaaatagcagctctatatcactgttattttcacttagccccaacaccagtattttaactattagtcaatcctcaggccagtgtttagcaatattatcatttccagtaataacttttatttttttctttatcaataggtttagtatttatgccagtattggtctcccaatacttttgatagatttataatttcagttgtccacgtaatcacctttgtcagtctccccaaagtcacaggatggttaacagcatgaagatgaagacctgaggcttcaaaaggggcaaacctaagtgatgtatgtgggaatcattcttgttgccttggcctcactacccctgctctgtatgcactctctgaagtcacaagccaccaatttgttccagtggcttcaaagatgcacacttataaatttctgttgtgagccattttcttgagaaagttgtggtcttaaagtaaatgttttttattagacaatttattttgcccataatttaccaggtggtacatagtctttgttcatcaaataatccacacattgtcatagttgaaatgacatttcatttaattaatgttaatatttcgtccagtgatcacaataaaattataaaagcaactgggtaatttgctcaattctgtagcaaaagtagatgttgaaactcttatttttcctctcaaaaaattcgtccctgactgtaattaagaagcctgtttgacaagccatggaatgccttaagaagcaccttatctcacagtttctgtggggccagaatccagaaatagcttagctgggtccttggctaagggtatcacaaagctgcagtcagggtgtcagtgagactgtccttaactggaggctcaatttaggggaaaatctgcttccaggctcacttgggatgtttgcgaaaaagcaaaaaacaaaagaccctgagatcttcatgtttcttgctgtctgttggaggctgcccttggcatctacaggctgcccatggttccctgccaaatggctttctccaggtgtgcagcatggcagtttgcttcttcaaggacagtgggagagtgagagtggctagcaggcctgagtcatatataacgtgacataattacgagagtcaggttccatcacaggtgccatattctgttgggtagaagcaagtcacaggtccctcccacgctcaagggaagggattacataaagatatgaacaaccagagtcaggaccataggggtaccttagagcctgcccaccacagggagctttgtgtattgtgaccactactgaatccttagtgccctaaaacggtgcctgacacatgttagggattcaataaatatttagagttgaatgaatgaatgaatgcagatattacttctttgaagtatgtattgctaatgtttttttccccaagcctgtggcttaccttttggttttgtttattaatcacatgttttaatacagaaatgttaaattttaatttagacaaattaacgaaattttttttatcttggtttgttttattagtttacacctcagggagttttcctatctagagaacagataaatatttgcctatattttcacttaggtttttaactacttctttatttttttacatttattgatttatctggaaggtcaacagctaaatggagagttgaacagaatgtggtgaataatactttttttcttcactgatcttttttttaccttatttggattgtattaaatattatatactagcttctgggctctctactttgtctcatttatttctcattctattcttacttcaattacacacttaaaaaattacagcattttaaaaaatgccaagaagttgctgtcagactcattccgtataataattagtctatgttataagctgttgtaacagcttatatacagagacacaaataaaatggaagcttatttatcttttgtgtaacagtgtagagatgtgtagagtccagagtaggagggcaggtctccccagagtcatctggggacccaggctgcttctgtctcgtacctctgccagcccctagactgatgtcctggtctgtgtggttgaagtcgtttcatatccacatccatcttccagtctgttggaagagggtgctggaagtcctcaaaaagtacctttgcctttgagttgatgaaccagaagtggcacacatgacttctgctcacatccctttcatggagactacactttattgccacaactaccttcaagagaggctagggaaaaatggtatcaaatagagtagacatgcatttgactacaatttgagaggttctattttatttttaaaaaagaaagcatgtaccaaggacaacaaatagtctgccccagtctagtattcatagttacaaatactcatatttaataggaaagtaataatcatgtcttaccaagtgaagaaaaatcaacctttggacatagcaataagatataaatatgtcctgatttttggttttagatggcgagtaacccatgggccaggtagcgttctatgccaaccttgaatgccatcaggaagtcactggacagcaaactcttccaagatcataacttggctgttggagcaacctggaaaagaagaaaaaagaaaaaccatggcaaaagtaaatagagctcggtctacctcccctccagatggaggctggggctggatgattgtggctggctgtttccttgttaccatctgcacacgggcagtcacaaggtaggtaggattttcttcttaacttattaagatgacctggcctgtcttttcttttaaatctgcttcattctctttctgaacccatcattgtgaagatatgtgtgtgttcatgtggtgtgtgtgtatttccgttgactcttcaggtatcattttctttgcaaagtatgtgattctctgacacttatgagtcccagatagtggtcttttcatgtggggtgtgtatatttccgttgactgctcaggtatcgtttcctttgcaaagtatgtgattctctgacacttatgagtcccagatagtgatcttttctatcatatctgatatttaaacctggagtcttaggacatttgtaggccaatgctgtgactattccagccattcattttcataagcagctccagaagatgtggaaggatgtaacatctatttcttttcactcttcatcttccactcttcagtaatatgaaatacttaaaactcatcacatgtgaaatagcatgggaaatgtcctacagtattttcataatgaaatcacttttctggggattttaaaggattggtaaatgcatacctgagaaggtaagttagcttaagctggcatagctccaggggagggtaagatcatttctacaagtgtgtttctccagaatttttaactgtcatcttaatgataaatctaaattaagatagatcttattcattaaagttttacaaagctaataggatgtgtgatctataattcataaatcaagaaaaacactatgggcaaactgatggcaagagatcatagtcataatggtgtgatgtggctttaagtctagggatgaggaaaaggggtaccaggtgacaagagtatgattataaagtttacattggatgtgtgaatgtatcacacagagttaatcttacacaaggttagggtctatattcatcccagaaaggataaaacatgcaaggccaaaataatcctggaaaatttcttggctccctagggctcattaagcccctggaagcttaaaacctagaatttaaattattttgctttattttgcattttggctgttgtggtgatgacttctaggttgaaggagagcacaaacatagatacagggattctctcattcttgcctgctctcttctccctcttacttttctccaaagtcagtgttgaatatgcctaagttagatgcacgtacattaagactcatccatctcatttatatttggagtaaatatgcattcgaaatctacatatgtgagctctttcctctacaggtgctttcattcaaatagaaatctttatttctctcctctggcagcagaccattacaagaaagtaatttggactaattatttgttggcatcatcaatacaggcatcagtgtccctcccataacaaagatacagtgcaggatagaataagatgtttatctttgctacagtaacggttggttgattgtgtatcataataaactacagatttgttcaaaataatataattgatgctgagtgattttacactgttggtgggaatataaattagtccaaccattgtggaagacagtgtggtgattcctccctgacctagaaccagaaatactatgaagtgtgattttttttttttttttttttttttgagacagtgtctccctctgttgctcaggctggagtgcaatagcatgatctccactcactgtaacctccgcctcccagattcaagcgattctcctgcctcagcctctggagtagctaggattacagggatacaaaattttgtactgggatacaaaaattacgcctggctaatttttgtatttttagtagagatggggtttcaccatgttggtcaggctggtctcgaactcttgacctcaggtgatccacccgcctcagcctccaaagtgctgggattacagacgtgagccactgtgccctgccaaagtatgattcttaagaagacctctgtaagaggaattgggagacaattatccctttggcattgtgacttctcatcactgatatgacagctccctggacattaagaagtctagattatgagtctataatatgagtctgtaagactcatctatattatgagtcttgtgttctgggtttgaggaagtcatggagttaaaaggaatccctatccttggtccttcatatagaagcttccatcattcccatgatgaaagagttctggaagtgggcacaatgctttagaaggagggatcatgctggaatcttaggggtagttgagtcttcatgatgaagttgcacttctgtggaattgcccatagtgcttttagatgagatactaagataagtcttccaatcacattgcctcatgtgagccttgtgatttattcaccctctatttaatagattaggacactgatgctcagaaagattgacttgtctacatttattttattttattttgagacagagtttcactcttattgcccaggcggaagtgcagtggcgtgatctcagctcactgcaacctccgcctcccgggttcaagtgattctcctgtctcagcctcctgaatagatgggattacaggtgcgtgccaccacacccagctaattttttgtatttttaatagagacggggtttcaccatgttggccaggatggtctcaaactcctgacctcaggtgatctgccgcctcagcctctccaagtgctaggattataggggcgaggcaccatgcccggcctacatttctttttgtctagtaggacagagctggactagaattctagtttgtttgtttgtttgtttgtttgtcactgtgcatacattcataatccattgactcttgaaacacacacacacatacacacacacacacacacacataaacacagaaaccgctatgccctttccaatacataactaaatagcttcctaaactattctcatacacacaccacacttctacctgcccctgcatacacactacacacacacaaacatacacatacacacacaaacatgcaaactctgcagcttatcctttagaacaattgtgtattataagacatgggtttttttttttaaaaaaactgccttggttatgggagtcattgtcttaacatgggcaacttcttaatatccagcgagctgtcatatcagcgatgcgaagtcatagtatcaagggaataaatgtctccaaattactcttacacaggccctcttaagaatcacacttcagactaagaaacctaggaaccaaggaattaattatcttttcttctcataaaatgtatatcttagtgcaaaattcttccataggaaaaattgcagaggaacaggtattcctgagtgctcttcaacttttctccttacttttcacagtgttttactttactgtaaacttcttaggcttgcccctcctccgacataccacagacaaataggaaaaagttaaacacatcttacttgcacaatttttttccagtaagatcaaaagttaactcaggagcctaaagtggtttgttaactcaccccacattgcaatttataggaaggggataatccatcctgatttaccatcaccccatgattctttctatgctttgaaattcatgattggatgtattttaagaacttaaaaactgttcaaaagtgtcaggagtaatcactaataatgcctctttccaccttgttcccaaccaaatcgtaattaagtaaagctcttcagtatgtgaacagtaaaggcaatttattctatctgcttaatgtgaagctgtatctaagtatgaatttgatgatgaagaatcgaaaggcaaaatcagttcactccagaaataccttccggtggtagaatgcctgtcacttgagtcatttccttaattatagttggtgcgcttatgccaaatctttcaattggataactaagggagcttaactcttaagtcctctgtacaccaaaaaagaagtaagtagatagctccaaagtgcctaatcctgttatttttcagacaggtaaatagacccaaaggtcaaattctcatacttctgtctgtggaagaaccatgaagagcatgaaactcatagatgcccaattttgtgttatcacttgaccagtctaacatgtttgactgaaaacccctgcctcgtttggccagaggtatatgggctaacgcatattggattcaattggcgatgatactggaggagattctacataacagctacttagatttggcagcactataaacaattttatctttatcaacagtaaatggatgctggttctttaaagaagaaaaaatttgccaatccctctgtctgaaaaagaacatctatgttatgctcctatctacaaataaataaacaaaccgcccaggcagaacccaggacatccacacatgctaacatctttcattattgatcctcagggacacaatggatgttctacagagttttccaggcccttctccatctttaggataactcagaacaccacaatcacaatcagacttggggtaaatatgtttatactgctgctctcagtttccactaaacaaattacaatagcattacagtctgaatatttttgaaaaagtcacagggggagagatctttgttccaaaaagaaatagtagctaaagcaggatggaataaagggtgcttagttcagaaaattctggctaattcagtgttctgtgtaaaattaagtacatgtgttctctgcctacaaaaaaaaatgtaactggttgtacataaaaatattcaataaagattataaaaaaaagaatcacacttcatggtatttctggttctaggtctttgaggaatcaccgcactgtcttctacaatggttgaactaatctatattcctgtgaatagtgtaaaagtgttgctatctctctgcagccctgctagcatctgttgtttcttgactttttaataatcaccattctgactggtgtgagattgtatctcattggggttttgatttgcatttttctaatgatcagtgatgttgagcttttttcatatgtttgttggttgcataaatgtcttcttttcagaagcatctgttcatgtcctttgcccactttttaatggggttgtttgttttttttcttgtaagtttgtttaagttccttgtagattctggatattagacctttgtcagatggataggttgcaaaaattttttcccattctgtaggttgtctgttcactctgatgatagtttcttttgctgtgcagaagctctttagtttaattagatcctatttgtcaatttttgcatagaaataccatttgacccagcaatcccattacggggtatatacccaaaggaatataaatcattctattataatataaagatatatgcacacgtatgttcagtgctgccctattcacaatagcaaagacatggaatcaacccaaatgcccatcagtgatagactggataaagaaaatgtggtacatatataccactatgtatatactatgcagccataaaaaggaataagatcatgtcctttgcagggacatgaatggagctggaagccattaacctcaggaagctaacacaggaacagaaaaccaaacactctgtgttctcaatcataagtggaagctgaacaatgagaacacatggacacagggaggggagcaacacacactggggcctgtcggggtgggggagtgggaagagggagagcatcaggaaaaatagctaatgcatgctgggcttaatacttaggtgatgggttgataggtgcagcaaaccaccatggcacacgtttatctatgtaacaaaccagcacatcctgcacaagtaacctagaacttaaagtaaaataaaataaaattttaaaaaatgaaaaaaaaagaatcatacttcatgtgtaattgcaggctattctgttcataaattggccacttgagttgggttgatacttaaaaagcaatgtttgatttaaatgtccaaaaccctgtccccctccaggtctgagacctatttttctctaagtctactgggtccaaattaacttaggtgcaatatatgtctagaatcctatgggattgtagagttcttttgaactctcttaacaatagttgaattcttataataattgctaactttaactgagcacttacattgtgcatgttggcattcttcaagcattttttatggattaaatcatttaatcctcataacacacagcagttgaagaacatgtccaaggtcccatggttagtaagtggcaggacttttagccactaggctgcagtgcccagtagatcaattctagtatgccagatgttggcagcactcactgtataggagacagagaaaaattttacagcagagtggcaagattgagacagcagtcatactggcctctgagagaaggtatttttgagaatgtcatttcgtcacagatgacacttggtgatactttgtttccacattcttatgaacagagcctatgaacactgaaagttgttaggagttgtttgctactgcagcataatccagcccattctgactgatgcagtcatgtttaccaaaatgctaattttagagataaagaaactgaggccctgagggattaagaagctttatcaaaaacctcagttacctagggtgagaaccagggatcaggaccctgcttcactgtaaaatattccaaagaacaaccaaaataataaaaataatttctggagtgagatgcacacatgctcccaataaaatttcatttatttaatatcatgcctgtgttcagaggcatacatcatgaaactactactcaaaaagttctgtggtgcttttcccctttgagaacagataagtgataaaatattcttcccatatttcatgaaagtcacaatcattcagaagcctgtatgtggttattagaaagtttgcctttgttaagcctgcttacatgtttagacaagaatttcaggtattaattttgatttctgtatatctaaagtttgattcatatgactgattaagtcatctaagaaaaccagcaagcagaaatcaaagtaacctttaaaaaaagtgacaagggacagacatggttacactactaagttccccaaaacaatttagtgaaaaaaagagattattatttataatttgaaaatatcatcatctgggggcccttttctcttagacatcatgtgatcctcttacatctccagcttctgcatctccctcttgtggatttgttttctcagcttgtaacactcattttcttcacatccctactttacctcacctaaccacatgttcctatatagctaccatccagtcttcctccttcttccctttctcattcatagttcttgaagttgctactcaatcattttcacttccttgtcttctagtcacttcctctaccaactttaatccttcctcctttccttccttcctggcttgcttcccttgaaaagtgttttatgaacaccaagtatatgacaggtactatactagatatttgggattcagtgtgagataagacagacatggtcttttctgtcacagggtaacagtctagtgaagaatataaacaaatgcaaaggaaattgccacacagtgtgataaatgtccagcatgtagttgaaacacgtaagagtggaatcaagagagacttgagtggtcagggaaaccttcctggaggaaggttatcttgagactaaagaatgtgggaggttgggagagcatgctagaaaagaaaaaaaaaagtgaaggctcaaagatattaaaaaaaaaatcatgggtgatgtgttaaaagaggcaagcagaagttcagtattgctgaagtgaagagcccaacagatgcgcagaaaggaggcacactaagaagggctagctcatgcagtctcctaagtcaggttaaaaagtatgaagcattaggatctgattggtgttctagaacattgggtgtagaatgtactgaaggtagcctggtgtgaattcaggaagattaggagggttttggctgcagtaccagagaaaggtgctggtgtgaatgatgaatggtaagggggttagagatattaatatgttgaggaatttgagggatatatatgagatagtgacttatgcctataatcccagcactttgggaggctgagacgagaggattacttgtgcccaggagttggagaccagcctgggtaacataggaagaccttgtctctagctggacatgatggtgcactcctgtggttccagctattggagaggctgaggtagggggtaggcgaatcgcttgagcccgggaggtcaaggctgcagtgatcacaccactgcacacacactgcactccagcctgggcaacagagctgagacaaatgaaggaagggagggagcgagggagggaggcaataaaagtaaaaaggttaaagagagagagagagagaataagtagaacttggcaattgagtaggtcagtggttctcgggcagactgattttggtctccagggtgcatttagcaatgtttggagacattttgggtagaagccagggatgctgctaaccatcctacagtgtgcaagaaagccccccacaacaaataattacctggcccaaaatgtcaatagtgcttccactgagaagccttcgggtaaggataactagactacagtcatgtgttgcttaatgacggggacgtgttctgagaaatatatcattaagcaatttcattgtcatgtgaacatcatagagtgtactcacacaagcctagaaagtagcgcgtactgcacacctaggctatgtcgtataacctattgctcctaagctacaaaccggtacagcatgttactgtatactgaatactgtagacaattgtaacacaatggtaagtgcttgtgtatataaacatagaaaaggtacagtaaaaatatgatattataatcttatgaagtcaccattgtctatgtagtctattgttgatcaaaatgtcattatgtggtacatgtctgaattttataatgagggtaaatccaataaatcattattcacttaaattgaagtcctagtggttaggagaaaataataaactttttagtattagactagcaatttttaaaatgttaagaaacatcataaggtttttgttgttgtttgcactgaattaaagctagtttgactgttgcagttaatcaatgccaggcagtttatgttaccattctctctgtcgttgggtgtgactgtttagtactccaagttctgatataattattaatctagcgtcagatctgctgcagcatgtctggtttcttaaatcactggatagagaaggaccactttttatacccctttgacagagaattacatagagcattcgtgtggcatacaagaatgggactgcggtgaacacagagatgtgccactcatttggccttagctgcagggtgtacagtcagcagagcctgcagctgtcagttcttaggtccccctcacctgcagaaagctgcgtctcccaagagcagacccctgggcgtagagggggcacccaccgccaatggctgattgaggacgtgcatcagggctgaaccatttcatttgggattgactgagaatttgttaggcctgcattgcagttcgacctctctgcctaatcctgcatccttccctttccttctacaagtgttgatccttactgtatgccctgcatgccaaacttcatcccaccttctgctgggacttagaatttagctcaccacactgttccattttttctttcctaccacaaggatcaacaacaaaattatagggcccagtgcaaaatgaaaatacagggccccttgctcaaaaagcaggggaaaatgctgttaaatgtactaaaatagaaagcttcttcctttcttcagtggtctctttaaatttttcatgatgtttaaatttgctatttaatgttattctaagtaaagaaaatgagagtgtgaaataattagaatgaattgaccacacatttttatgttatgcaatgtcagctttaaatgcaaatatgagtcttgaactcatatatggaatcactgaagtcaagcaactcttattttatagctcatacatacatacatatttcattttccatcagaacagtagaaaccctgcacaaaactaactcaactgtttttatttgacttcctgaaacttgcacatcctatcgacattctcctaccttcagcttattgatgagtcaggaaggactgaaagggaatggaaatatgggttggctgatctttccatttccttctatgccatcaccctcaacattagtggtttgttaatacaaggaagtgatatgaatgaaaaaggatatgatagaaatccttggtcctttgtgattcttataacaccactgccttctttctgcatttgaagcaggttttggttcaaaaggaaagcatagcctcttggggctggtagacacttcattccctatccccaggcctgctaagctgtagatgtaacacacttacctcatactggctttgagtcctaactgaactctctcaaatcgtgggcctagcagaacactgtgcttatgggacatctctaacactatgtgtgaatggtgcatcacagaactgcagaaacacatattgcacgtatctccgccactcacatgaagtctccattgttccattgcactgcacttatgaaacagaaattcaaacataaaattattaagcttgtaatcccagcactttgggaggccgaggtgggcagatcacctgaggtcaggagttcgagaccagcctgactaatatgatgaaaccctgtctctactaaaaatacaaaaattagccgggcatggtggcgggcgcctgtaatcccagctactcgggaggctgagacaggataattgcttgaacctgggaggcggaggttgcagtgacccgagattgcatcattgcactccagcctgggcaacaggagtaaaactctgtttcaaaaaaaaaaagttcagtcagtgacagccaagcattaaatcaagtttcatgcttctaagtgccaggctctatgtgactgtgtaggctgcactcccatgaagccggccctgcctaacatggcagtcttgtttatacctggttctctcccttcttctccaagctcttcaccacctactttcacacccagcagcaactggggaggagagggagagtgaacataacaggttactatggattgttaaagcacaattaattggaacttagctccaaagagattaataacctcttatctcatccccaagccacaggcctgatttcttccctactgttatcaccgggctataaaagcttcctgcctgaatgaggacgccatgctaatccatataaggcttttccaagttgcacagtgatgcaaactattgcttctggttcacatgtctttctctaagtaattaactatttttcaatataaatatttctttctctttctctgcacatacacacatacacacacatatatacacatttctggttacataagaaatcatgtttattgtaaagtaattgaaaatgctctataaagattaaaataattatttctaatctcaccatttacatataatgattaggtacattttagtgtataagctttcaggaaattttcttttttttattatactttaagttctagggtacatgtgcacaacatgcaggtttgttacatatgtatacatgtgccatgttggtttgctacacccattaactcatcatttacattaggtatttctcctaatgctgtccctcccccatcccctgaccccacgacaggccccagtgtgtgccgttccctgccctgtgtccaagtgttctcattgttcaagttccacttatgagtgagaacatgcagtgtttggttttctgtccttgcgatagtttgctcagaatggtttccagcttcatccatgtccctacaaacgacatgaactcatccttttttatggctgcatagtattccatggtgtatatgtgccacattttcttaatccagtctatcattgatggacatttggcttggttccaagtctttcctattgtgaatagtgccacattaaacatacgtgcacatgtgtctttatagtagcatcatttataatcctttgggtatatacccagtaacaggatcactgggtcaaatggtatttctaattctagatccttgaggaatcaccacactgtcttccacaatacttgaactagttcacactcccaccaacagtgtaaaagagttcctatttctccacatcctctccagcacctgttgtttcctgactttttaatgatggccattctaactggtgtgagatggtatctcattgtggttttgatttgcatttctctgatggccagtgatgatgagcattttttcatgtgtctgttggctgcataaatgttttcttttgaaaagtgtctcttcatatcctttgccacctttttgatggggttgtttgatttttttcttgtaaatttgttgaagttctttgtagattctggatattagccgtttgtcagatgactggattgcaaaaattttctcacattctgcaggttgcctgttcactctgatggtagtttcttttgctgtgcagaagctctttagtttaattagattccatttgtcaattttggcttttgttgccattgcttttggtgttttagtcatgaagtccttgcccatgcctatgtcctgaatggtattgcctaggttttcttctagggtttttatggttttaggtctaacatttaagtcttgaatctatcttgaattaatttttgtataaggtataaggaagggatccagtttcagctttctacatatggctagccagttttcccagtaccatttattaaatagagaatcctttctccatttgttatttttgtcaggtttgttaaagatcagatggtcttagatgtgtggtgtcatttctgaggcctctgttctgttccatttgtcaatatctctgttttggtaccagtaccatgctgctttggttactgtagccttgtagtacagcttgaagtcaggtagcatgatgcctccagctttgttcttttgagttaggattgtcttggcaatgcaggcagttttttggttccatatgaactttaaagtagttttttccaattctgtgaagaaagtcattggtagcttgatggaaatagcattgaatctataaattacttcaggcagtatggccattttcaagttattgattctttctatccacgagcatggaatgttattccatttgtttgtgtcctcttttatttcgttgagcagtggtttgtagttttccctgaagaggtccttcacatcccttataagttggattcctaggtattttattctctctgtagcaattgtgaatcggagttcactcataatttggctctctgtttgtctgttattagtgtataggaatgcttgtgatttttgcacattgattttgtatcctgagactttgctgaagttgcttatcagcttaaggagcttttgggctgagacgatggggttttctaaatatacaatcatgtcatctgcaaacagggacaatttgacttcctcttttcctaattgaataacgtttatttctttctcctgcctgattgccctggccagaacgtccaacactatgttaaataggagtggtgagagagggcgtccctgtcttgtgccagttttcaaagggaatgcttccagtctttgcccattcagaatgatattggctgtgggtttatcataaatagctcttattattttgagatacattccatcaatacctagtttattgagagtttttagcatgaagggatgttgaattttgtcaaaggccttttctacatctattgagataatcatgtggtttttgtcttgggtcctgtttatatggtggattatatttattgatttgcgtatgtagaaccagccttgcatcccagggatgaagccaacttgatcttggtggataagttttttgatggatttggtttgccagtattttattgaggatttttgcatcaatgttcatcagggatattggtctaaagatccctttttgtgtgtgtgtgtgtttttgccagactttgatatcagaatgatgctcacctcataaaatgagttaggggggattccctgttattctcctgattggaatagtttcagaaggaatggtaccagctcctcttcgcacctctgatagaattcggctgtgaatccttctggtcctggactttttttggttggtaggctattaattattgcctcaatttcagagcctgttattggtctattcagggattcagcttcgtcctggtttagtctggggagtatgtgtccaggaatttatccatttcttctagattttctagtttatttgcatagaggtgtttatagtattctctgatggtagtttgtatttctgtgggattggtggtgatttcccctttgtcattttttatcgcatctatttgatttgattcttctctcttttcttcttcattagtcttgctagtgatctatctatttgttgatcttttcaaaaaaccagctcctgaattcattgattttttggaaggggttttcttgtctctgtctccttcagttctgctctgattttagttatttcttgccttctgctagcttttaaatttgtttgctcttgcttctctagttcttttaattgtgatgttagggtgtcgattttaaatctctcctgctttctcttgtgggcatttagtggtataaatttccctctacacacttctttaaatgtgtcccagacattctggtacattgtgtctttgttctcactggtttcaaagaacatctttatttctgcctacatttcgttatttacccagtagtcatacaggagcaggttgttcagtttccatgtagttgagtggttttgagtgagtttcttaatcctgagttctaatttgattgcactgtagtctgagagagagtttattgtgatttctgttcttttacatttgctaaggagtggtttacttccaactatgtggtgaattttggaataagtgtgatgtggtactgagaagaatgtatattctgttgatttggggtggagagttctgtagatgtctgttaggtctgcttggtgcagagctgaattcaagtcctggatatccttgttaaccttctgtctcgttgatctgtctcatattgacagtggggcgttagtctcccattattattgtgtgggagtctaagtctctttgtaggtctctaagtccttgctttatgaatttgggtgctcctgtattgggtgcgtatatatttaggatagttagctcttcttgttgaatcgatccctttaccattatgtaatggccttctttgtctcttttgatctttgttggtttaaagtctgttttatcagagactaggattgcaacccctgctttttttttgctttccatttgcttggtagatcttcctccatccctttattttgagcctatgtgtgtctctgcacatgagatgggtttcctgaatacagcatactgatggctcttgactctttatccaattggctagtctgtgtcttttaattggggtatttagcccatttacatttaaggttaatatgttgtatgtgaatttgatcctgtcattacaatgttagctggttattttgcccattagttgatgcagtttcttcctagcatcgatggtctttacaatttggcatgtttttgcagtggctggtaccgattgttcctttccacgtttagtgcttccttcaggagctcttgtaaggtaggcttggtggtgacaaaatctctcagcatttgcttgtgtgtgaaagattttatttctccttcacttatgaagcttagtttggccagatatgaaattctgggttgaaaattctttttctttaagaatgttgaatattggcccccactctcttctggcttgcagggtttctgcaaagagatctgctgttagtctgatgggcttccctttgtgggtaacccgacctttctctctgactgcccttaacattttttccttcatttcaacattggtgaatctgataattatgtgtcttggggttgctcttctcaaggagtatctttgtgttgttctctgtatttcctgaatttgaatgttggcctgcctcactagattggggaagttctcctggataatatcctgaagagtgttttccagcttggttccattctccctgtcactttgagggacgccaatcaaatgtagatttggtcttttcacatagtcccatatttcttggaggctttgttcatttctttttattcttttttctctaaacttctcttctcatttcatttcattaatttgatcttcaatcactgataccctttcttccacttgatcaaatcggctactgaagcttgtgtatgcgtcacgtagttctcataccatggttttcagctccatcaggtcatttaaggtcttctctatgctgtttattctaattagccattcctctaatcgtttttcaaggtttttagcttccttgtgatgggttcgaacatcctcctttagctcggagaagtttgttagtactgaccttctgaagcctacttctgtcaacttgtcaaagtcattatccgtccagctttgttctgtcgccggtgaggagctgtgatcctttggaggagaagaagtgctccagtttttagaattttcagcttttctgctctggtttctccccatctttgtggttttatctacctttggtctttgatgttagtgacctacagatggggtttcggtgtggatgtcctttttgttgacgttgatgttattcgtttctgtttgttagttttccttctaacagtcaggtccctcagctgcaggtctgttggagtttgctggaggtccactccagaccctgtttgcctggtatcaccggcagaggctgcagaacagcaaatattgcagaacagcaaatattgctgcctgatccttcctctggaagctttgtctgagaggggcacctggctgtatgaggtgtcagttggcccctacggggaggtgtctcccagttaggctacacgggggtcagggacccacttgaggaggcagtctgtccattctcagagctcaaacactgtgatggaagaaccactgctctcttcagagctgtcagaccgggacatttaagtctgcagaagtttctgctcccttttgttcagctatgccctcccccagaggtgaagtctggttgagctgcagtgggctccacccagtttgagcttcctggccactttgtttacctactcaagcctcagcaatggcagatgcccctcccgcagccgggctgccgcctcacagtttgatctcggactgctgcgctagcagtgagcaaggctccatgggcgtagggcttgctgagctaggcacaggataaaatctcctggtgtgccatttgctaagaccattggaaaagcatagtatttaggtggcagtgccccaattttcccagtacagtatgtcatagcttcccttagctaggaaagggaaatccccttgtgcttcctgggtgaggcaatgccccaccctgcttcggctccccctccatgggctacacccactgtccaacgagtcccagtgagatgaaccaggtacctcagttggaaatgcagaaatcacctgtcttctgcatcaatcacgctgggagctgcagaccagagctgttcctattcggccatccaggaaattttctatttacataaactgtttttacaaaaataagttcctactatatgaactgtttggtaactaacttattttttacttaacattatattgcaaatttatttccaaatcaatatatacagatcaacatcatcatttttaagacttactattttattttattgatatgccataatttatttagccactcctttattgatgaacagttacattggttatgatatttggctattctccagaatatatcctcttatatatctattattattatatccctcagaatatatccttttatatacacatatatataattttatagactaaattagttctccagaatatatccttttatctatctatcatcaatatcacctgattatttcctttatataaatcctagaggtgacattgctggtgatatataattctttattgtcaaatcttaatttgtataataacctctcagaagaagttagcaaaatacaaaaataaataagaatccatgttcctgacctgcttttgtttccataaaaccttccttagagcagtagttttcacatctacttggctttagtagcccctgtggtggttgaacacttgttcttcttgttatccagcatggcccaaatggtcagcttctgatttcccacttattatggtctagcaattaaaacccttggaaacaggagcagctaattgaaccaaacattttaagttctggctcaaatgcatgctcattcattttttgtataaaatgcctgcattgtatttttcagatgtatctcaattttttttgtggagttccagacatacttcactcaggattacgcacaaacggcatggatccattccattgtagattgtgtgaccatgctctgtggtgagtattacttactaggatagggaattactggccactcttgaactgtatatgacaatgacattccactgactttgattactagttttcctaagtagaagggctacattaaaaactggctaggactatataatataaagaaaagatcaatcctatcttcagccaaagccaaccagacttgctcttgtaattaatggtcttggctgatgtcaggtagaacagttagataatacactcaaaagaacacgtaagatttggttcttccatatagagataggacgctgagcattctagaacacgtcctgattttggaagcaatttatagtatatgcttggcttctctcttccaaatgctatggccttctcattctcaagttgtgtaaatagttattgatagtaccatgagccatttttacatagtcataagtgccaacagtgttgtatcacatctcaagtcttggattgcattctgttcctcccccagggcttgacatttggctcatggatttcatctttttcatatataaatcttcatgcttagagaagtattggggaaggataggattatgtcgtcatgagataaacatattcattatgggtgtaatttcattcaaggaactccgaaagtgttatataaggtatgtagggtgttctagaaatgtatggaattaacattccatctgtgtagtagaggacaacaaacctggcatttgtttaaaataaatttcaaactcacgttattaaattgatgtcttagagagtttctaagattaaatcaaattgtttgtagcttagacccacttaatccattcatttcaatgagttctgagtattttcggaaattttcatctcttcaagccatgtcttagtggcaaaagggaaataatacctgtattcagtaactcataataaccattttattccattctaggcactgactcatatttctttttggaaaaaaaattcatttactcatgaatcagttaaattgtactgaaatgtataatatttgtttggttgggaggaagttgagagcagttctaagactaaaagcaggtttcatgagaaggctaaatcaactcaactctttcaactaagaagaaggtcttaagggatcaaaaaatcatatattcgagttatagagcttgtcttttttttgaaaccacttgattttcagggtcacattattagtcacagcatttgcatcagcacaccaaagaagccatgtttgtcttctcagaggataaaagtgactaatttccctcatttctatcttttggaggatattcataatcccccaaataggaggaaatgaccttaggtgaccaatatggtcacacagtcaatatggttcacacagtcaagctttgagtagggttatgtcagaagcaacatatttaaattctatgcaagaccaagaggcctgttgtacacaattaccatatacctacctgctcaccttgtaacataatattagaacattaaagttcagagtatggatgagagtctgcagaatcacatgtgggacacccactgggaacagatctgctctgtgatgaacagagaaggtaacagttgacccccaatttcagtctgatcaatacaaaaatgatcatactcttcagacacctggaaaatcaggtcttctgatcttgctactaagagttactgatgtcagcatgaatttttccttagaaggaaattcacatgccttcctcacccatcactcctgccattagtctgagagacccaaagagtaagggcgtgaaataacctcacactcggtgttaggtgctcttgttggtgaccttgggccatgccatatacccctgaacttcagttccattttggtctctggttttacttaatattctatgagccttgaggccaacataattctgatacactggtaagccacaaaccaagtgagaccaaccagaatgtcaccatgggcatgaagcatttttcttagattttctgggctttgatatctcaaccacagggtgtgctgaagcctgaaaactgggccagattgtggaatttgtctatgatctctctccctggtcttttactgcataaccctgctggtcacatggtgttatccactttctttctccagcaattaactgtcaccattattgctaatgatatatgatcaacactatagtaagcatccctgtgcaaatgacatgtaatttagagaaagttgatccactgtttaaaaaacaccctaccgtcctgccattatgactataatagaatgaagaggattgagccctgaaatgcaggtcaggagacttgagttctattccaaccctgctgcttattatctgtgggaccatggacaatcacttcctttctctgggcctcagtttccaaagctgcagaattaatagggtgggctcaatgctttaaaggttctctcctctgtcaatgccacatcacagcctttcacagtgccctcaaggcctttctgttgaacctatttcttattgtttttgaagctccacttgggagtgttgtcagtaaccatttatcctgtcaagtgggaatcatgctgggtggcttgcttgcatctactggactcatcctgagctcatttgccacgagtctgaagcatctctacctcactctgggagttcttacaggtaagggcactttgtaccacctgtctcaccccactccattcaggggtttccaagcacatcaacagagaagtaattcataaaatattcattttgttagatgcataatttagttgacctagcttatgtctacctacctagcagttaaacagagctggaaatgagattacattaccctaatgaaaatgcatctccactgtaattcagccagatggtaaaagcaactgcagctttctccttggaattagtgtatgactgagattctgtactcagaagaaacaagatattacccagggcaacatgaattttcagcaatggtcattcttccagccattgccaagacattaaaatactattgacggtcaatctgagttgctcctgctttataatgaatattgctgtccaataaatgggagtttctaattttaaaaaaccctttattgtgaatattcttatattacacattctttctcaatgctgtggaagtatcactttagcaaatcataataaatgccatggaaaaaagcaacatgtacattcaataaatcactcttacagagactgcataggattgtgggactgcaatgggagtttgcctatcactcaaaggggtgtggagagtagcgccaactcctgtctgggcattgtgccattggtgtggcgtgaataaggtcaataaaggacgtaacctcatagtgaggctataaatttggctatgttagctaaagaaggtacacccacccctagtaacccaaagaccctgactgctgctatggtgaccaatggatcccagtttaccaggcactgtcctggttttaacactggaagtcccacatccagaaacccctcagtccaggcaactctgggttgctggctactgtgcactgcagttggaagcaggagcttctgaaggtggttctctttttccttctctgacattctagttgccataaaatccaggctcacagcccctcagattttcttcacttaaaaagtaatagaaattgatctttttttttttttttttttttttttttgagacagggtctatctggctcggtcctcaggctggagtgcagtggcgcaatctcagctgcaacctctgtctcctgggctcaagccatcctcccccttcagcctcctgagtagctaagactacaggtgcatgccaccacacctggttaatttttgtatttttttttgcagagatggggttttgccatattgcccaggctggtctcaaactcctgagctcgagtgatctgcctgcctcagcatcccaaagtgctgggattacaggcatgagccactgcacccagcccaaaagttgaaggtctctaaaaactttctaaagtgtcaacatttgtctgctgaccttaagagatattttcacatatatgaaaatatacattgctatgttcacatataaaattggcatgatgtttcccaactatgtaaaattaccctggaattttcatagttgtacatgctatttgaatccaaattccagagtggtgcagattgtcagtgttgtgtcttcataggcagtgaagcgtttagggaattgtctggataatttaagttaaaaaatggaggaagtgataagtttctttggttggcattatccagattttctagtgaattccaatttagtttgtgtaattatttttatgttcttcatttaattttgtttatgaagtcatatttccttaagggtgttctccctaaaaagaaagtcatatatattctacattttccaaattgtgaatgactggtgaggggagactcattttaagcttggtgtaaaaagcagctttaaaagggtttaatgagaggtcagattctctttaatataaatcattgtattctgagatatcattggctgtttatggtacttcagcactcatagagttctctttatcctcaggtcttggatttgcactttgttactctccagctattgccatggttggcaagtacttcagcagacggaaagcccttgcttatggtatcgccatgtcaggaagtggcattggcaccttcatcctggctcctgtggttcagctccttattgaacagttttcctggcggggagccttactcattcttgggggctttgtcttgaatctctgtgtatgtggtgccttgatgaggccaattactcttaaagaggaccacacaactccagagcagaaccatgtgtgtagaactcagaaagaagacattaagcgggtgtctccctattcatctttgaccaaagaatgggcacagacttgcctctgttgctgtttgcagcaagagtacagttttttactcatgtcagactttgttgtgttagccgtctccgttctgtttatggcttatggctgcagccctctctttgtgtacttggtgccttatgctttgagtgttggagtgagtcatcagcaagctgcttttcttatgtccatacttggagtgattgacattattggcaatatcacatttggatggctgaccgacagaaggtaaaattcatgaaaccacaattggttccccaccaggggactttaagccttgagtttctcctcagccccttaccctgtggagtacctaggtctgaataatgttaacaagtctgcagtatctgaaggcatctcccttgctggtacttctagatcagaggttggcaaaattttctgtaaaggaacagatagtaaacatttttggctttgtaggccaagtgttcatcataactacccaactctgctattatagtacaaaacagccacagacaatatgtaaacaaaagagagtggctacgttccaataagactttatgcacactgaaatgtgaatttctcttataattttcatgtgtcacaaaatattgttcttttgattttttccaaccatttttaaacggaaaaaccgttcttaattcacaggtagtacaaaaagatgtcatgggccagatgtgtctaaattgcagaagcctagggtaactacaagttctggcggtagatttaattccatcccaagacaagtcagtcctcaagcaagacaacttttggctgggtgtggtggtgttagtttcttttgaaccagtcctgactggcaatggaaaaaggagcagaattcagtttaggcaggagggccaggtgcaatgataacacattgtctgtagccacatattcatgtttgacaatgcaaattgcaagtaatttccttgtaattgcaggcttagaaaccaaagttataagaaatctaccaagtaatttcttcagcaaatgctcatctgtttggactgaagagtgcaggctactcatattctcctaaatgatgaaccattcacacttgagatatgacctgcagggctaataccatcatgtagcttctcacaaattatgtttttggtaattaatcaggatccaactgccattctccagtgttatgaatatgatatttagtattgattccacatttttaatggttaaagaagaagtggaagagcaaagattacctattttcacaatcaaataactcagcaagaagcagccaggtgtaggtctaatggaggcatctctactctgaggcatactagacctaagttcttgcactggctttgctccttattaaccctgtgacctacagaaagtcacctaaccctcagatccacaatgatctctatctgtaaaatgagccagtgcaatatttgcctgttgaccttatactattttgtgatgttcaaatgaggctgtgagtagaaaaatgtttgtaaagcataagctgttggagctgacattatacagattctttgaaattattggtatcataaatgggtttggagttatcaggaaaattaatgggaataccacttgggagatcttgaaatatattagacttcatcctagtccaagacctccatcatctctggcaaatcattttaatgtctttgtattacagtttcccctttgtgtaaccacttgggttattgagtatttatgatctatgacatgccagataccaatggataacatacctaaaagtatctaataaggtagactgctaggaaaattacccttctgatcctttacatcaagcttgtccaacctgtggcacatgggctgcctgtggcctgggatggctttgaatgtggtccaacacaaatttgtaaactttcttacaacattttgagatttatgcactctttctttttctttctttctttctttctttctttctttctttctttctttctttttctttatttctttcttttctttctttctccttatttccttccttccttccttccttccttcctcctttcctttcctttctttctttttttcatcagctatcattagtgttagtttattttatgtgtggcccaagacaattcttcttcttccaatgtggcccagggaagccaaaagattggagaccccattttacattttatttctattttatttcacgactaatttcagagtaaccctgtgagataagtaacctttccattttatagctaaagaaattgagttaggcaggcagtgggtggcaggactagttttaatattctacctttctaattttgaagtatatattctttctaccacaccatgcttcctggagagatgaattcttgcatttgcaaaaaagaaagataggaagacagcatacataacacacaatgggaaagccatctctgtaaataactgcaatgcttactgctgcatagccgtggctctaaagctcttttacagaatgtgtacctcctgcacttattcttgttcttcaaatctacaggtgtctgaagaattaccagtatgtttgctacctctttgccgtgggaatggatgggctctgctatctctgcctcccaatgcttcaaagtctccctctgctcgtgcctttctcttgtacctttggctactttgatggtgcctatgtgactttgatcccagtagtgaccacagagatagtggggaccacctctttgtcatcagcgcttggtgtggtatacttccttcacgcagtgccatacttggtgagcccacccatcgcaggtaagtttccagagagaaaccccaaccaccttttctctttggcatattgatgtgaaaacagcaaacccacatgcagtcaatgagaaggactgtcaagagagttggggaagagtgaaagagaaaagggatataagagcccccaaaaccatcatggtcccacctacatccttgttttataatcttcttccaaccaagtaagaaccttagcctacctggaaagagtaagtcccaaattagggtcttgattcctttccatattaatgatgggagcagggggatggagcagttgttcagccttataaataagtagggtgcattcagagggaagtctcaggggagaacaggattccaacagggggcagtgggtgatgaggctgaaattataaacgccagtgtcatagtggagtgttttgggtgccagacagaggaactgggctctattcttcagagactgtggatagtattaaagtttttatgtaaaaggataatatggtaaagtatatatgttagaaaatgtgatctagcaattgatctagtaacttaggagagaggtagctaagattccattctaatagtttaggaggcagctgataaacgcctgagctagggctgctgcagcagaaataaagatgagctctgggggcaaggaagaagttttcaaaacaaaattcagcagaatttagcatacagaggtgaatgagagaaagaagtcaaggatgacttagaaaataatgtcatggttgagaaaataaggaaattcgagaaagtggctttgcctgaaaaataatgaatatggtttttagatatgttgagatttctgaaatatacaggtaaaaatgctcaatagagctgtttaaagatgaaatatgagctttagtggatggcctggtttatatatagatttgggaatcatcatataaagcacatagaatgttttataaactctaaaatgctatagagtgaagcatgattaaacaatttgacaaatatttattgtatgcattaaacaagtaattcaacaaatacatattgcatgtgtaactagcattgtgtttatcatgctggagagacaggagtaaacaggtcagaagctgtttctccttcctaaagcatgtggtctacaccacctgcatcagagtctcctagggaccttgttaaaaatgcagattccttgacactcccacctgtgatctgaatgttgaggatgagttccagaaatctgcattttcaaccagctttgttgtgatgctcatgcgaggtaaatattgagaatgactgttccatattattatctgcctaaattaaaactgagagagtgaacaagttctctgaagacaggcaaaagagaaataacccaaaactttgcctagaaagaaggcaggaatttttttgaggaaggcagagtttctgctattagctattattgtgaatagacagtttcaggctatttccaaatccagcaattggggtggaataaaaacagcaaactaggggaaattgtggccgcttgagtggtgcagatgacaaaaccctgttcagtttgaactccatgatacagatctttatgtttaatgctccatttttgaaaactgcccccaaaatattcccacatcctcctttcatagcttattttagtgctcaccaacctttagaaacagtgtcattctatcaaaggtcacaggacacaaatgaaattgggattcagttcgtggccttcattggcaaatcagacatgatactcattactggaaattcgaggattaattcttattgtatcattttcttatttatttacctttcaaatgacaactgtgtactcagtcttttttgtttggtgctatagaattgcacaagtaaatcaaacaataactaaaatatttgagagcagtttaaattcaggaaattttgtggggcttataacaacttctacatgctatttttgacgaatggatctgaagtgggtaagagaagaaatcatatacttctctggtgggttttcttggcagataaggaaagtttgaaggaatttaaaaaaacctttgttaattataaaataattgcctgacgaagtataatgttattccactggttttctgtcattgtggaccctattttgcatatcatatgcccggttttcctcaaaatttagagctgagatagatattgagattaatttgttgcaacaagagataaagaaaaaaaagctagtttgcatttgcaactgctaaaatagctgaaagttctgattttcaaactggatagagtacaatgactgaatccagttgaaaatgtgatactgctttgaagcatgtcatgttactcaaaacagtgtatgggtgctgtgaatactactggcattttgtacaaatatgttctcttaacaccctaggtaaattattccaaccttaataatttaaatgatgctatttttatctttttaccagatttcatggggttaatagtaactaatatttacgttgtgactactaagtacatgatgcttttccaagcactttacagaacaacaatcaattcactctagaagttttcctggaaaacagaatgtatttttcagttgctgcacaatatttttaggtgacctctttttgtttcaaagttacaattggtggtgctatcgatctattattatccttacaaatcattagaatttgagagtgggtaagcaattgaattttcaactcaaaaataaaattttgctgttgtttgttacaggacggctggtagataccaccggcagctacactgcagcattcctcctctgtggattttcaatgatatttagttctgtgttgcttggctttgctagacttataaagagaatgagaaaaacccagttgcagttcattgccaaagaatctgatcctaagctgcagctatggaccaatggatcagtggcttattctgtggcaagagaattagatcagaaacatggggagcctgtggctacagcagtgcctggctacagcctcacatgaccaaaggccttgagccccagaatcttcaggtttgagagaggtggggccaccagattcttcatgtttctgaaactttttattttggcagaaggattgccttccaaggaaattattattattgttttgttaacatattaatatttataagggaaaacagcacataataaggaaagctggactagcccagagccttctcatttgggatttgtgctcataactgaactcgtatcttttggtcaatgggcatagctctgtaagaaatgtaaggacacagctgatataattagctgtaattagggataatttcaaagcataaccaaagcagatgacactgggcagcagctttgttccagtctcaggcccttcatgttccctcctcagaaagaaaatggaaacattaacgtgtagctttgcttaccttgttctggttagagaagggaggtcagcttgggtgtggtggtgaagagtgaagatgccatactttttcatggtggagtttctcattagggttttacttgggattgttaaagaatacttgagattcttcaaaaagtggtgattaatatagaaagaaactcttattttttttttctcttagtcttccagccagcccttgcctctgcccaagggtagacaccactatgagaatccaaataatcatggaatgccatggttggaatagatcttaaagggcatctggtaagatccatttgaaattgtccactggaaaccgaaagctcttttcctaagactgggttccaggctctcacatttgttaccatcacatataatacttactctaaatttagcagaacacacttagtcacaaggacaacctctcaatcttacctgaaatgtcaacaacaccaaaacttcccgtcttttaccttcagagaagaagctcttacttagactgcagacgcattcctgttaggttggaaaaatgttggcagtattccaattgggcaggaactgaattcttgaatcagcaggtctctggtgagagttttctttgcagatcagacatttagttttatcattacccaaaagaggattggagggagtcagttgtctgaaaaatattatcctagagatattctaaaggtgagattcctttctccctgtgttaattcttgttccactatccactgctcttcatctctttatagataataattagaaatctactcattggattataagtttattcattctcaaatactccacttttctatggtttgggataatttctgagtcttcagattgaagagggaaggcatggagggaagaaaaagtccagatcccccagcttgtttccaaccattttaagtccaaagaattataatcctgaatctcacagtgtgtcacacctgtaataggagtaaattatgcaatcaattttaattaccaggagtttaaaatccaaatgtcaaggaactgttttgaccctgaaggctatttaatccactgtcccctacaaggcctcacaagtgctgggggaaaaaaaacagcaatgaggatgatcctgagttaatgtgtatgctccgcaagagagcttgcctataccttgattatttcataaaatcacatgttaatacattgctttcagaatgaaatactgacttgatctgataggagaaaatggtaatatttcatagttgttttccaaagacaaatttaaatgttgtctgttatctccttacttagtttaagaatttagttttgaaccccattgactttgtcatttgcaattttaaaaatatttgggactgggcatggtcgctcacgcctgtaatcccagcactttgggaggctgaggcgggtggatcatgaggtcaggagatcaagaccatcctggctaacatcgtgaaactccgtctctactaaaaatgcaaaaaattagccaggcgtggtggcgggcgcctgtagtcccagctactcatgaggctgaggccggacaatcgcttgaacccaggaggtggaggttgcagtgagccaaaatcatgccactgcactccaccctgggcgacagagcaagactccatctcaaaaaaaaaaaattggaaggtatctgtaaaatgtcaaagttaagatgaagttatatctgtttggaatagcactttgccctaaatatcatttcttgaattttcaagcctaaagatgtttaaaaatatgaatagttacaaatattcttatacatattttttatcatgatcacaacaaaattttgtttatgtggttctgcaatataatttctgtgaagtattacaagtatttatgaaaaataagcatagtgatcagaaattttaaagattttgtataaaaacatttgggagatttgactttatacatgcatagatttgcattttactttcccttttgaggcagcatttttagaaaatcagtaagaaaaatgtacatcttaaggtctactattttacatttctacacagaattttagtgttaatgttccatgtgtctatactgtttatttcaaaactgagaaattcatgggaatgatgtattttgtggaatcaagaacaaaattatagtgggataattttacatcttaaatatttctttctactactgtaagctctactttggaattatctgagtagaaaatcagaagacattatctaactttgtagatacactgtatgattgggctttttgttcagattgtaatttcattaatagatgaaatatttatgctaatattttcttatttcaaaagcaaaataaaatgaatttattgtcctgtgtttggaaagacatttttccctcggacaagaggtttggactggatggtgagtgggcctgtctggatcatgctaagatgtggtcagcattttaagatgtgttaaataatcaaatgatttacaaaaaccagaagtctttattgagttcttccaatgtgtgagctattatgccaggcacttcctatgcattgtcattgtcgaatttaatccccatagtgacctctattattatcattttgtagatgtggaaactgaggcaccagttcccacagctcagtatcctctagtgtgaaatcctgtaaaactgggatgctgctgatgctgaagccctgtgtccttcccctgtgcctacttggattatcttatgtgggttcaagaagctgttgggaaaccgacgctcccttggacagataaaatcctttggattatgcttcagtcttctaatcaatattgaaggaagattctagattggagatttccaagagttttcccaagaggatctatcaaaaccactactttcaggctcagtggtttaatttgctgttgattgatccaggcttcttttggggagcatttagggttgagggggtgaattggggagcatattttgtcccaaaagtgagctagttccactgtctgctttccacattaccaaagtcaggctttctcagttaggagttgagttctttttgaattgccttcaccactgccagtgataatgaaaatggtaatgtctatttgacactccccttcctggtcccagtaggtctaattctgaaattgtttactgaaatgaaatagtacaaattcagggtggatatctgagtttcttttctcacacttgaaagtttgagtaaaaaaaaaaaaaagttttttttttgtttttttttttaactccgtcaagcaatagatttttatatctgttgccagcgtagctaccaatgacagataactgaggttttgtcccatagcacggaaaactatttggttggggagtgggaagatataaataatgataaaaggactgacatttaagacaaaacatgatggtacttttcaaacatatacaaaagtagaatgaatagtgtaaagaacttgaggtacctatccccccacatctacaattatctacccattatcctctcccttgagaagcaatttgaagtatattaacatgtgggcagctcatgtttccttcagctgccagggaatgcctgaacttggcaagaataatttgttcctgctaacggggacatgtgtggttagtatcacctattaatgagccacatcattacttacaaagctgattggggctcctttcttgatatgggctttgagtgtctcaattgaagattaaaattttctccttttctccccagcccctaaggatctatctacctgaggcccagggctgtattaaataagttaaaagaggctttttttttttttctctcctgacccaagagagtcaaaccaatgaaaagggattttgaggtttagatgagagtgatcattattactctcattattgctcttaattgtttaagggtcagaggtctttttgagggatctgggacctaagattggtctagaattaagtaaaaagcagtttatttttgagttgagttggcactaaaaggctttagaattagcatttcaaatgcagcccttttcacatttttccataaatatgtttcttttgtgatgacaagttaggccttttcccactgaccagtgtaatgatggaagagttcaaggaccttgtcctacgaaagatgaagacctatgttcattcttggatagcttatttttgcaactgtgggcagagcaaggtgtgggtataggtcaaggtagggaagagttcgggagtgggagaaaggttggggggcagcttctgtgtggttacctgaggttccggcccacgtgcaggtggatgaatccagatttctgaccctaagctcaaacagggaagagcaaacagctcaaacagctttctaaagctcaaacagggaagagcaaagcctttttcagaatcgcagaactgacagggctggtgtgagcattcagtgcccacactggacctacgaagtctcacagggtgtagttcctgacgttaggctacatcccccatcttctactacaatctagcgcccagtttttctatcagttccttcaagtaccaagcctcccctttatacccctgaccctggggcattttgcatatgttgatccctgtgatcactctcttctcatattttgggtctcagtttaaatgtcactgccctagagagtccatctttaaccactgcccttatctaaattatacatccctcccccgccactaccacccacattcttcatgctcatagcattctattattttccttcaaagaacatcttttagttatgatcatatatattgatgtgtgtttttatttttaaatttcatctgctccacaaaaccacaggctttctgaggatacggatcatactgactcattcactatttagagcagtgcctgacccagagtaggcattcaatgaatacttggtcaatgaataaatgagtgtaaagaacaaataaatgaaaaaactgctaaggagaattgtaacattagcgagggtggggcggattgaagggttggggtgcaggtttgtttgggtgcaaattgctcttgtacccagaacagacaggatacattagatgttcctaatttggtgtgtcaaaataggacaccttgttagaagtgtcacaaaaacagtagaagctctggagcattgaccattatggagcaggttttggaaagggaataaaagtggcaaagtaaagagttgatcaaaagatattaaataacaaactttggattgaggcctgaatgtaaaaaatgatactactgtgttcaacccagacaggcttaattaaatagctgttgtgcacaaatgaacggaaacccaagggaagaggaactgttcacacaagggagccctggaacgttgggaaaatgtggattgcacctgccccaaacctgaaaagacagggtttcaattacaggcaccacacaaactgcttttacacaaaatatttatgccagggttttgctaggtgcagaagatgtttctgactgaaatctttgtcctgaccagacctatggctgcccctaactcataaagcattattgaaaattagacagtatgctggcagacatttttaagagatggtgaaaggagttaatcaaccaactatttatcaagcacctctttggaatctggaaccatgttacatatggtggagaattaaaaatacacataggaccccctccatgatctcaaatttactacctaattggtaaattgaaaccaactcaggttagaacaacaccaagaagttattaaatgttgacctgaggctaagggcatgtgtagtactttgagggttaggagaggaagaattcattatgggttgaagaaatttgattctggggaatttgaagacaggattgaacagattggaatcagcccttacttttttcagggcaagaggctgggagtgagggaaagagatgtgaggcagctgctttgtgtggctccttgaggttccagcaggcatctcaggccagtgcagaaccaagcacacgtggacataaatgttccgatgacgggtccataaaggtgtctgggacttttggggattgcagttgccttctttaagtacaaagcagggattttcagggcatggggttataattcaatattcatctctcaactgtaaagagtgtcattctcttcttaaggatccaaagtttggatccttaagcacagaaaagagttttaaaattgacatattatgcagcactgccatctgctggaattagcaagaacacttcccaggagtaggggaatctccaattgttcaactccccaaggcctaccttaaaggcacaaacattaaagtttgtcattgtttcctcctcttccaactcccccttgctcgttacccatcccacatttatcctgttcctcttgcaagtataaacacggggataaagatgctgtgttgcagttttcagcttttggttacctatatcagttctgtaacatagagtatcaaagttaatatgaatgatgattttgactggcttgactagggatagccattggtaaaacataacgtaaaaaaaatttgaagtcctctgcctttctctggaacccagattgtcagccttccattcttgttcccactgtgacccctactaatgtgttaatttatttgatgtgagttgataaaggagttaaagtgtgagacacagaatctcaaagttataccagaagccaaatgttagaaaatgttgaaaccaaatgatacagaagaatggattccatgtcaatttgaaaacataaaatatcggattatactgtacagcaaatatgacaaagtgattaaatttactttaaatgtgtagtgcatgtgaaatcgtggggattctatttatttataactgaaattgctttcaaaggagagtggatcatgttaaaatgaaagttcttatgtagaactaagaactaagcaactcatagttgggtttgtgactgagtatgaggataagagttagaactgaattgctctgtttaagaaaaatggaggaacggttttgaagggagaagagacacagggaaacaggcaaagctcagaatcacagaaagaggcaggcatatcaataaatggttggggatctttccttcttttcttctttctttgctccctccattcctcttttttgtttcctgtctcccctctcccaatatccctccctctcacttctctccctttttctttctgaaaaacagagattacctaatattaactttaaagttgtagattcttctgtctcctaagatcttctcaataaagggtttttatatagaaatgacctgtaagtgattttagttttggtgttttggtttttatatttgttgttgtttgtttgctttggtgagatttgctggagttgatgtggtatggaaaggaaaagcatgtgaagagagatgaagttactcttgaacaaaattaatatttaatagaattagggactcgcagccacattccaaagtccatggcctggaggctcaaggcaaactcaggggatgttaaagcgcaggtgaccccagccctagttgttacacgtgttccagcgccctccacccctccccatcccctccccgccccttccctttcctttttaaattgacaaataaaaatcatgtatatttatcatgtacaacatgatgttttaaaatatgtatacattgtggaatggccatatcaaactatctccttgccttcttattttgctctccacactgggtgagggtctgatgctggttggtgtgtgcacaagggatatatccttccttccaaggacaaaggactgggtacgtgttctggcttctaattgtttactggttcttcagtcttccaaaatatgtggcttcctttttttgaggaatttattccaaatctttgaattccaaaatccaattctggaaacaaaccctcacttagatggagtccgtcagtttcttaggtcattctccctgaggtttcagaacagcttttaatcccagcatcaagaggcagctaatgtacataaatagttccctttcctagttccttccagggaatttcggggttctgtgtacaatagtgtctggtgacctatgattgtagaatgtgggcttggtgtgatcctctagaatctctctcctctggtctgtaaagatttggtcctatcttcccatatccttcattccaaattttaagactatttagaaagtattatatagtagttaagtgctagattctagaaccagacacccagagtttgaatccttttcccacctcttattaggtatgcgaccttgggcttgcttaatgtgtctaaatcctaattactcatgtgcgaaaggaaagaataaaaatgcctattttaggggggtttgtaaggattttacaagattactacatgccctgcacttagaacagcacccggcagatattgtgtactatgtaagagttagctataactatcattgcatcaccggagtcaagaacgctagtgttctatgttaagtgttcaatccaagtggcctcagtctatgcttgcccttcagagtttgttgtctgtgaggcacctgtgtgctcccattgaggcatggctttcccaaagcttattcatgtcaccttcattatttctttagttactcagctaggtgccatcatgaaaggaggtattgagaaatccagttcatcacttacagaggaacccctcagttcagacagttttgggaatatatacatggcatttctagtacatttctagtaattagatgctgttttattcctcaaagtgaaatacaaaatgttgaatgaacaaattcaacttagtaaatatgaagtttccgaagaagggggtagttgtgtttggggtgggatccagtgtgtgtggcttgatcttaggaaaagagaaagctaaagaagaagaaaccacatcccagtgaggcagggaactttggctcagaagagaagtagagaggaatgcggaggctggagtcctgggagaaaaggggatgtacaagcagaaagagaggggatgtatgagcagaaagctaagtgataaacttgttttaaatatacacttgctatgttgttctgaagggatagaaagaggaagaaagttagttttgtgagaaggggctatcccaatctgtgatggtacgttttataatgttattttttgatctgtttaatatagactttatctattggttttctgctatgttgttaggatttaattaactgaatttaaagaactcttctcatcccacaactcaatttttacttaatttgttttataagttatactaacatatttaattcttactccataaaaccttaactgtatcttttgagtctctattcttctgctatggtttgaatgtttttgtctcctccaaattcatagattggaagcttaatctccaatgcaacagtattgagaggtgaggcctaaggagagatgttcctgagggctctgcccacatgactagactaatggtcttatgaaaagggcttgcaggagtgagttcttgctctcttctgctcttctgccatgtgaggaacagagttcctcccttccagagggtgcagcattcaaggtgacatcttggaagcagagaccaggccctcaccagacaccaaacctgccagctccttgatcttgaacttccagtctccagaactgtgagaaataaatttctgcttgttaaaattactcagtcttaggtattctattatagcggcacaccagaaactaagacaatttcccttacctctcttccccattctcttttccaaatcaaatattataacattggaaagatttatttctttatttattagacagagtctcactcttgtcgcccaggttggaggagtgcaatgatgtgatcttggctcactgcaacctctgcctcttgggttcaagtgattcatgtgcctcagcctcccaagtagctgggattacaggtaggtgccaccatgcctacctaagttttgtaattttagtagagatggggttttgccatgtcggccagactggtcttgaactcctgcctcaagcaacctgtccgccttagcctcacaaagtgctgggattacaggcatgcgtcaccacatccagccatgttttgttctttaatcataattactcatccagaaagttgaagaacaataaatgacatttatattatgtaaacattattcacctactgccaattagagtcctctaattaaatttctttcactagatgtgtcagtttgatccaagatgggatgttgaacatgcaagaaatgtaatggaaacacctctgagaaaaaacgggaagagagcagacagaggctgggagagccatccaactgtgatgcaggtctgaccccatatgtaggagagacagaaggaataaaagttgggtaaaaacatcttagattacagtattgttttaaggaatatttggcaaggctggtggggagtccttgagtttaaattgctcatcagaggagtactgcatctctcaggagaggacatgacttagtaaccttgccacactgggaagcatggcctcagtgtaaatgtagtgatagatttcaatgtgtagagatgggaccttcagacaattataatccttgtagctagagatctgagaggtgcttctcattgctaccacattagggttacaatgttattacacttgaactactcaaaggagactgttctaattgtcaaggccaaatggattttcatttcttgtaattcaccaattatataaaaacatgccacattgttttataggtctgtcatgttccttaatctcagtaatgaacatattccataaagggactatccttgggcctgcctgtgttgtaggtgatgtcacataagcatagtcacatcatggccagataaactctgtcaattgagtttgacagactccaacaaatggagtttgttgcctccaacaaatgattatcggtagaaactgtaaaatgggcatgagtgctactgaaccagcagccaggagaaagaaattatggtccacaaattagttgtgaaaccttaagtcatatcaccagtcctggtctcaatcttcatatcaataaagttggttggagtagggattttctcaaggtcctcctgattttaaagttctgtgttgtctacaaggttgttcctgaactgaagtaatcggcatcgttgactcaatctagaaaggaatagtaacagcttatattgcttttgaaactggctgatagcatgtgatcaacaggtaagactatttctgcacccagagaggaagcaaatatctttaagagctccatgactgggaaaccagtttttctgccagctgatttatcatttgttgaaagggcttttctcagcttttgtgagtcagggagcgtacctttagtgctgaatgaagtagtttccaagagcaccttcaagatttggagaggcagcacttcttttccggaagggtcaaattaccctgaagagcaatcacagccacttttctgggcatatttatgagtttgtctaataggcaacaaaacaacttgggcctggcatcataggattcttatcaggcttgacaggatgagttcatctaactaagtaggatttggacccatttcagagactttgagtcagttgataagggcagttttcagaggtaggtgcaggacaatatacaattcaactcaggcagcttttattagagtattatataccaagtatatgatgaggagtccaaatgcaaactggatattcaaggaacttaggatttcctgggttaagcctattagcctaattaattttattccatttatacttacttttcacatgtccatcagtagctcccaaactttgctgcacaagttccaactgggaaatctaaaaatcatgatgcctggactgcaccccatgccaattaagtcattctctatggggcgggacccagacatccatgttttgttttaactttttaggtgattccaatacgtagccaagtttgaggaacaatgctgtagaccttactactcaaaatgtaattagaacagccacagcatcctcacctaggaggagcttgtttaaagtgcagaaatctcaggccccttctgtgtatgaacacagccctgatttataaaaacaagttaactgatgaagcaaataatcttttctatgaactgatgaagcaaataatcttttctatgattaactgtctgagtaaccgcttaatgtgagttcttttaattatgtggcaagtgatagaagttatgtactttcaggtgggagaaatggcctgctttgctagaatatcctaaaatatctgaaagggacaaatgtgtctactgataggtcaggacttcagtgctgactttctgaaattcttgagtaaagatcattcccttccttgttcttccttaatagatcaaacaaaataataataataataaaaacagaattaagtaaaacaaaagatttttaaaaattaatacgtgagatacactgcagtatatatgtatgtctgattacgcatagaaaaaagatctggaagtttacatatcaaattataagttataagtttaccttgagggtgtggaactgtggtagggtgagaggactgctctcatttttaaattcacatacttttgtaatttttttttgaaatttacagtgagaattcattatttttataataatcaaaccataatagaaattttaaagatgataaaaaacaaaaagtaaaacacacacacatacataataattttaagagttacattggaggaatggagaattaaatcacatggtacttttccactaatactgtgatggtacataattgtgtagtcggtaatcaaagaaactacattagagaagccacattaagtaacatccgaattaaaaagtcccctgggataagagccctcaagcagcgacccctcaaggtggatattaaaactgaaagcagtgcttaactcttcctggagtatctacatgaaaaaaacaacattctgaaaatttcacattaaaaaaaaagcttcatagaagtcactttgaaatgctaaaatagccaaaggccagaaattgagggtataaaaactccattcagaacagattcaaaactagtacactgaaaccttggtaatctatgggtgtaggttagggacatcttctttttccatttgtttatcatttctcccaatttcccaatggctgctttatatctcaataattttaacctaaaaatattgtaattttagttggaaggaataaaattaattgcatctagattcattgcagatttgttttagttaaaaaaaaaaagagaacaatttgagactcactattttccattattcatttttttccacataattatttctagctacttaataaacatttggggattgaatccctgaagttacatatttaaaatttgaggaaatcctttttctcctcttctagttttttctttattgaagtcactagagatgacaaacttttttattataaacttttttccaacaaaaaagatattttaggtgactattagattgatagctaaatatcctcatcaaagtcaaaacatctgtaactaaaaagtgctgtcttttgcaagctacacaattaagagcttaactatcaataatgtaattttgtactcctggaagagtattcctgatctaggtatcaaaggtttacgtaggaatatatttactatataatatgagaaattcaaagagcagagataaaaagcacagatctaatggccataccatttttagaagttacaatagctagaatattgctatttctcaatggattatagtattttaattaaaaagaaaaaaagaaagaaaaccgcacaagattcatcataatgcatataaagtatttagcacaatgcttggtacacaataactattcaataaatattagctctataataaacaagggattaaaataataaaaaaaaaacaaacaggagaacccaaaatgaagggaaaaacttagagctaatttcctagagtatgtatttaaatggaaagtcggagctcacagagagcagtcaggaattctgcattttctggatctatcttttgtgccttctcatagtactcagcagcttgcctcttttctccttccagcttgtaaacaaaccctagggcacttaaactctgcacatctaaagcattgtgacaaagtctcttggtagacaatttcttcagagcacttgtcagtttggtgcgaaggggtgatctgtctttgacctttaaggcttctaaataatgatggatggcagtattttctgatttacggtgaaattcctgaaagcggccatagtggtaatggatctgatgtttgtgatcatcggttatgttctccagacgaagagctttccggaaaatgtcctcagcattgctatactggcctccttcagcgtacatgttggccaggtctgtgtaggcaaatgcaaacatagagtctcgttccatggctgctttgaaatgaaatatagcagatgaaatcagctcatcaacctttagtttatcctttcctttaggtctgttgtgtgtggccttcttgatttggatcatttgtgccctgtagcaaagtcccatctggtgatgcaggaaagaagaagttggtgtcacctccaaggccttttttaaaagttcgagagctttgttccaggaattttttctcctatagaacttggctgcataacgaaggacgtaaggctgggatgatatttggtccaggatttcttcaatatacttttccccttcagcttctgcatgtacatcttgaagcttcagtgccagaaaaaccttaatatagctgttatctgggttcagggtaacagcctttctcaaaggccccagagaaaagctctttacagacccttctctatcagaatcatccagccgatacactgtgatagcatagccgatgttaaattctggattgtcaggctccacttccagagccttctcaaaagccgctttagccttttgataatactttcctccaaatttcaagagtgcccagcctttctcacagtcagtctcaggacactccaacttgtagttagaaggactggacaatttcttacagacattccctatcttacctgtatacttctgagcttcttcaagctggtccatgtgataatacacccaggcatagtttccccaagtgaccaggcttcgtacttcttctttgtctgagtgttcttgctggattatttcttctgcttgttccaagcactcaagggcgtctttattttggccttttaggtgtttcacataggccaataggttataaagagcaagtctagattttgtggtaagaaattcaagctgttgcccaattgtatcttctacctcaaacagatcaatgtcttccttaagtaaattccatgtaaaatgacattctaactccaacagaatggccttcaaggtgtccttacgaatttcactgtcaaagataaaatactttttaatttttgaagaaatacaagaaataattttctaaaccttaaatattgttctttgcataacaactaattttatccctatttgatcttacagttaaaacataagtttcccataactttatactagagtttcttctatatacagttatgtcctagaaatatttcatttaaattctcactatttattgcaaaaacagttctggagagatgacagagctttctgtattacatgtatctatttccttttggcaatcactaaaccattgaaaattaggaatgaatatatacatattcaataattaatatgaaaattccatttttgtattatgagtactgatcctgactaggaaacctggtaaaattgctccttggtaattgttcctttctctagtgtaattgtaccaaaaatatgggcaagacatgccatgtccttacagcctgcttaaatccacaacaacatggctttaccagccccctgcctaaaacaaacacctgttttgaaggtctctaccagcccagcccaaggaggatgaggagggctgctcaggtattatggatttggttgtaagatctcaaagggacattcaatcaggtactgacgtggtttgtccaggctctggaatttatgcacaactggacaccatgagaatttttattgtttaaactttgtctacttaattttgtaactttgtctttgggaagctaataagagagaagctattgcatcagaagaggtaacacgtatctttcggtaattctgttcttctgctaggaagaagcagactttcattgtccttgggagacagtccccaatggggctgagcccttttcctccccatcctgcatatatacggtgcacgccaccgtctttttctgttttttgttgttgttgttgttttgttgttgttgttgttgtcaagccccttcctgatagcactctcctttcttacaaatgttagatgtggccaggcgttgtggctcacgcctgtaatcccagcactttgggaggctgaggcgggtggaccacgaggtcaggaattcgagaccagcccggtcaacatggtgaaacccgcgtctctactaaagatacaaaaaattagccaggcgtggtggcacacgcctgtaatcccagctacacgggaagctgaggcaggggaatggcttgaacccgggaggcggaggttgcagtgagccgagatggagccattacactacagcctgggtgacagggcgagactccgtctcaaaaataaagttagatgtgtgggtggcacttaaactttttttttaaacttataatgggaataattaacatttattgtgcaagtattatgtgctaagcagtcaactgataggatttattactgtccttttccacagtcccaagagatggacaccattaatttttacaaataaggaacagactcacagagtttgagaaactttgggatcactcaactagtaggagttcagtccggatttagaacaagggactatctgcttttagagcccaagaccttaacatctcattcctcaactcattaaatgcggaaggttcactaaccacgtgcagggcggggtgctagcccctggggatacaaaatgatcaagaaaaggacgccatcatactaaatcagtaaaggaaacagataaagaaatcctcataaaacagcggattgggtgggacgataacaatctgtgcttggtacagaggtagctcctgggaagggaagaactcagacccagaaatcagaaacgcaaactggcagtggcaggcgaacctgacgcctgcagggctgcggcgaaaccgcgtatgccacaccgagggaatggcagctggaaagagaggcacgcgacaggcctaaggagacccgtggcacgtagcagctgcccccggaacagcgcctgggggctctgcaggcgctgaccagtttcccggaggcggcggccgcggacccagcacggtcaccgtcgccgctgccgagaagagccgtcgggtcgcgatgggtggacaggccttccgggggagcgtcgcccggcacataccctgacagtcccgaccgcagacgccagggatgggacaggctcccggggagcatctcctgttcctcctccctgaccggccttcttaggcgctggggaggggccggactcccgagaagcgtccactcggccaccctccccggcaggcccgacttcagacgccgcgcgccgggacagagcgcccggggagggtccccaacgcagatgcccggttgctgggcgcgaggggctcggcccctgaaaaggccgcagaactgcgctggaaatgaataaaagcagcccggtttgaaaccaaggccgacgcagggcttgggaggagaggcaaaggaaaacccttacctcatgatggcagcgctctgcaggccgtccgggcggcgcagtccctcggatcgctctctcctcagcaccggggaccgcgggaagccgcgcggtgggcgtgcgcgtgcgcgtgcgcgcgccaggcctctgcagcccctggactcggccgcgcggcgtgtctttgttaaaggagagaccccagccccagcaagaacaggaaactggagattgaatcagatgccgagcgctcagaaactgaaacttaagaaatcgaaactaaacgtaagcttcagaaaccgaaacttaatagaagagctcaagagccgcggccagacgtttgcggagtccagggtctttcggagttgaatttgcagctgggctccttcactttggtctcggcttttatctgcctccctgagtacgctgagttcgcatgctgcccgtgtaactgtttgtttgtttgtttgtttgtttgagatagcgtctcactgtgtcacccagtcgtgatctcaagggatgcgcccgcctctgcctcccaaggtgctgggattacaggcggaaacttaagtccctgcttccactccagtcttttgattcaacaagcaacactgcaatgctatacatctatgctgttatttctgttgggtgtaaactgagaaatttggagctaaaatctatatacattttaagttttgacggatattgccaaatagctttaaaaatccactcttacccacaattgtaggagactgcttctcttccataccttcgccaatggtgctttgtaataaggacccaataaagacaagagtggtattggggatctaggcagaaaatgtcaaacacccataccttaaacattttgtcccctttgaattcattcagcaaatattgacaaacaactgtaagagccagactttgttcaaagtactgtcaatataacaataaagaaaacagacacgggccttacccttattgagttaatgtctgtattcaaaacctcaatatcctgtccataattcatcttttgcattgattttggttttttttttttttttgagacagggtctcactctgtcactcaggttggagtgcagtggtgagatgacagctcactgcagcctcaaccttcatggctcaagcgatcctcccacctcagcctcctgagtggctgggactatatgcgtgcaccactatgtcgggctaattaatttattttttgtagaggcggggttttgccatgttgcccaggctggtctccaacacctgggcacaaatatttttctaaaccttaaatattgttccgcccatcgtggcctcccaaaatgctgggattacaggcatgagccactatgcttggcctgattttgaatttttaaaaacatattgcattgaaatattgtctaccttgatcactgagcttctggcaccccacccctcaaaacttagtgcctgaagcgagtgcctcatttaaagcaatcacttctaacagttgtactgtcttatacagaaactgctggtcacctgtggctattaagaacctgatttttaatttaatataaatttaaaaactgataagttaatagaaaacttacatttggaataacttaggtatacgaatctgctttttataagttgcaaattttatgaactctaaatacagagcaagtatttccagtgattatcctcagcaaactaatgcaggaacagaaaccaaacactgcatgttctcacttgtaagtgggagctaaatgatgagaacacacggacacagtggggaacaacacacactggggcttgttggagttgggggtggtgggagggagagcatcaagaagtatagctaagtgatgctgagcttaatacgtaggtgatggtgtgtccggaattggttccttccagtaggtttttggtcttggtgacttcaagaatgaagctgcggactctcgctgtgagtgctacagttgttaaagatggcgtgtctggagtttgttcctttcgatgttcagatgtgtctggagtttcttccttctggtgagttcgtggtcttgctgacttcaggagtgcagctgcagaccttcacagtgagtgttacagatcttaaaggtggcgcgtccggagttgttcgttcctcccggtgggttcgtggtttcactgacttcaggagtaaagccgtagacctttgtggtgagtgttacagctcataaaggcagtgtggacccaaagagtgagcagcagcaagattcgttgcgaagagcgaaagaacaaaacttccacgacgtggaagcagacccgagcaggttgccgctgctggctggggtggcctgcttttattcccttatttggctccacccatatcctgctgattggtccattttacagagagctgattggtccactttacaaagtgctgattggtccattttacagagtgctgattggtccattttacagagtgctgattggtccattttgacagagtgctgattggtgcgtttacaaacttttagctacacacagagtgctgattggtgcgtttacaatcctttagctagacagaaaagttctctgagtccccacctgacccagaagcccagccagcttcacctctcaatcccccctctaaacaggacaccccaattgctgatgggaatttggctgatgactgctctagctactttctgctggataggggcgaagaaggggccctgtaggtgtagtgtcctccagaggggaactctttaggccagtggaagggccagcaggtcagtccaggggtcctcggtagaagttgttagttgaactcatttggggttccatttgtaagaccatctgtagcttgagggcctcaattctagaggaaacaaatttgacaagaaggttaaaaacacagggcccaaagacaagtaacagcaagatggctgccacaggacctagaaaggggagaagccatgttgcccaactccagaggttggtataagagtttgaaaggtgttgtctgatttcagaagccttttcctgtaaacaccgggtggcatctcgtgctatccctgactggttagtgtaaaaacaacactcttcccctaagaagctgcacagtcctcctttctcagcagtgaggaggtctaggccttggcgattttggagagtcgctgctgccaaagagtctgtttgggattgtagagtaaggatagatttcattatttcatgcaaactgtctgagaaatcctttgagagtgtatggtagtaggataatgcatgttacactgttaacttttagcaaactttacgttagttgaaaaccttgtaagtttgggatttcaattattctttgctattagtaagacctcgttcagtccatattaacttagaattggtatagatggctccttcctgattctgtaagtattttaaggtttggctgagtgcaaacagctgacacatttgagcagaccaattattaggcaattttcctaacactgcttctacaagagtttccttattatttactgaatacccattgtgttttttttttccttaattgcccaggaggaaccatctatccgtcctgtcctgaagggagttcctcctagatctggtcagacctttgtatgggaattaattaagatttagatcccctgttaggaaacctgctgggtaaggatttttgataggaaggctactggttgtcagtggcctcagtgctttcaggctacgcccttgtttacactgacagcaaggtggtattggagtgttatagggtttctgagaagaccttcagttatcaattataggttttaaatttaccc

SEQ ID NO: 5676 - DNA, 664135 bp, Homo sapiens
  SORCS3 gene - 106390849 - 107014983 of chr10; NCBI Entrez Gene ID: 22986; Build 35; sequence includes 20,000 bases upstream of initiation codon and 20,000 bases downstream of termination codon of the gene
ttatacctgtgccacctacaatgatccaatggaaagcttgtataaaatgtagcatgtagatgtaagagctaatggaaagcttgtataaaatgtagcatgtagatgtaagagctaattatgctcaattccaaacatgcagaattcaagaaacaaatatgtgagtttataaaatggaacaattagggagtgatgtaagtgctgaacaaaagaaggaactgcagaattcaatgaattctaaagacccttagctgcaccaactgccagtccatttgtagattaccgatggcttgtcacaaagaccgtgaggaaggctgagaaactaagcattggggaccatgctaagttgaaaatgagtcagaaatgaagtgacatcgcctctagaatgataaggcaaatcagtaagaaatggaatccaactgacaaaaattcagctttttgtacaacaatggtatttattgagagcttacaacttgacagaggtatttctaagtgcttatgtggattccttatttaatccttaccacaacctataatgttggttctatgattacctcaacctgacagatacacaaatcttcagggatgcacctgctacagaaaatgaaagtcacttaattcttaaaggagcccctttatagactaggagagagcctagatccaccaaaggcttacatgtggaagaggcttacttaaatcctgggagaaattggatttagttgtgttcatcgattctaatgaatctaacaactatttacacagggtcttctactctgtaccagaaacttggtttgctgttgaagatataatggtaaacaaaaatagatataatcagttctgggaagatggaatagatatacttttctttactccttctgctgtgtacaataaaccccctggacattgtctataaaacaaacataaaaggactctgaaaaatggaaagaaggcagattttctagggaccttaagacccaaggaaatgacacagtggtgtcattagaggtgtcttagagatgaagaaaccagtgaccaagaaatgccaatgggtgcagacaatacaattcctgctgtctgtagccaaaggaccaggaaagaggcagcctaacaagacaggggactttcagacactaatggctctactctagccaaacaccacagaaaaaactgtggctacccccaacccccatacttgcaatggctacatgggaggctagacctccaccctcttgaggctgtaaggaggtgctgcactcccctgcaggaatggtgtcagagaggaccaggtagaaagctgagactttcatctgctccaggtggtgatgaggcatccatgcctgcagtgtcagtagaaagctcctgtactcccacccagcaataatgaagccaccctgtgcatccctgctggggtggtgtcagaggaggcctggtggagagtcaggactttcacacctgcccagtggtaatgaaaccaacgccccccaccactttctacccgtttgcgtcagtgcccccccagcccccactttctacccatttgtgtcagtggaggccagttgggaagcagtaatgagcacctttctacccctcccagccagaaaggtatgaatggaggtttggtggggacagaggactctcacctctgtccagctccacctacctaggtgccaatggacgcccaggaggcaatgtggacatatacccccacctggtggtaacaaggtgacacgctctccttcccctgccagagctgaacagaagtcagctgaaacagaaggctcaaataagatccagcatcttatatactaaatatatccaggttttaaccagaacccatttgacacactaagagccaggaagatacctaatcaaatgcaaaaagacaattaatagatgccaacaccgagaagacagagatgttagaaatacctgatgaagagttttaagcagttattgtaaaaatacttcaaagagtaattacaaatgtgcttgaaacaaatgaaaatatagaaagttcaagcaagaaaattgaagatataaagaagagccaaatggaagttttagacatgaaaaacataatcactgaaaataaaaatctcaaaggatatattcaacagcaaaacagagggacagaggaaagattaattgaacttgcaggttgaaaagtagaaattacccaatttgaacaacagagagaaagtacactgaaaacaataaagagaacagtctcagtgcttgtgggattgtaacaaatgatctagtataaatgttctaggagtcccagaagaacagaagacaaaggacaggaatggaaaagtacttggaaaaataatggctgaaaccttcccaaattttgcaaaccacatacctacaaaaaagaaagacaggggtaactatctgaagtgaggaatatgttaattagtttaaggtgaatttatatatatacacacatatatattaaatcatcatgttatacaccttaaatgtatacagtctttgtcaaatatacttcaagttgaaaaattagtttaaaaaagacatacttatgtattcaagaagctgtgtgaataatacaaatcatctcccccaaaatctataaatctccaaaatagaataatctctccaaaaatctatagcaaggcatgtcacaagcaaacttttgaaaacttaacacagaagatctcctttttttttgtttgtttttgttttgaagagacagagtctcactctgttgcccaggttggagtacagtgatgtgatcatagctcactgtaacctcaaactcttgggctcaagccatcctcctgccccagcctcctgagtagcaaggaccacaggcacacacaactacacccagctgattttttttttttttttttttgcagagacaggatctcactgctggtcttgaactcctggatgcaagtaatcttcccaacttggcctcccaaagtgctgggattatagccatgagccaccgcacctggccagaaatatctttaaagcaggaagaaggaaatgatgcattacctataagaagaaatgattacctatagaagaaaatgattcaaatgcaactgatttctcattgtctgcacataagaaaccagcaaaatgtatttcaagtgctgaatataaagaaatgccaagctagaattccatcatcaataaaaatatccttcaagaacgaaggggataagccaggcacaaaaatacaactactgcatattctcacttatatgtggaatctaaaataataggaatagagagcagaatgatagttaccagagtctggggtttgggaatatgggaagatattggttaaaacatacaatggttcagttaggaggaataaatagtaagtatttgaggtgatgaatatattaatttgcttaactcaatcattccatattgtatacatacatcatagcatcactttgtacttcataaatatatacaattatcatttgtcaatattcaattaaaaacagaatgaacagaatgaagaggacatggaggcattttcagatgaagagaaactaacaggatttttcagcagacttactctaaatgaatggctacaggaaatactataaaaataaaggaaatgataaaagaagaaactttgtaacatcaagaaagaaggaagaaccaccagtaaacaaaaatatgggtaaataaaataaaattttttttaacttctttagttttctctattatctttgatggttgaaacaaaaattgtaacactatctgatgtggttctaaacgtatgcacaggaaatactcaagataactatatcataagtcggggagggtaaaagaacataaaggaaagtaaggtttctgtactttactcaaactggtaaatgaaaaactggcaggctgtgataaattacatgcatttaatgcgatacctagagcaaccactaaaaaaaaaaaaaagctatgcaaagagatacattcaaatgctatggaaaaataaaaatgaaatttaaaaaatgttcaagaaagccacagggaggtaagaaaaaccaaacagaaaaatggaaagcaaagaggataaacagaaaacaaaaaagaaaatggcagaattaagctctaacacataattaattacattaactataaatggtctagatatacaaaataaaagagattggcagggttgtttaacaaacatgactaaattatattctatctgaaggaaactaacttcaaatagaattataaatgtatgataaaggatatattatgcaaatattaaccaaagaaaacaagagtaactttattaatggtagataaagtatacttcagaacaaagacaattaccagagatagagatattatataatgacaaaagggtcaatctattaagaatagcaattttaaatgtgtatgcatcgaacaaaaaagctgcaaagcatgtgaagcaaaaactgatataattgaagggagaaattttaaaaagtctacaagtatagttagacacatcaacccctctcttgacaaataatagaacaactagacagaaaattagcaagaatatagaagaactcaacactaccttcaaccaacaggatctagtcaatacttacagaatatccaaaccaacaatagtagaatatattttgtttccaagtgctcacagaacatatgcaagatagaccatatcctcagctacacaacaaacctcaacacattcaaaaaattgaaagcatacaaaatgtattctcctatagcaatggaatcacactagaaatcaataacagaaagacaataggaaaatctctaaacacttggcaacaaaaagacatactccaaaataattcgtggttcaaagagggagtctcatgggaaattaaaaaaaagtttcagctgaatgaaagtgaaaacaacatatcaaaatttgtgggatacagctaaagtaatgctgggagggcaatttatagcacaaaatgcatatgttacaaaagaggaaaggtctcaagtcaataatttaagctcttaccttcagaatctagaaaaagaagagcaaaataaacctaaagcaagcaggaggaaagaaataataaagaaaacagctgaaatcaatgaaactgaaaacagaaaaacaaatgagaaaatcattgaaacgaagagctggttctttgaaatgagaaacaaagttgacaaacttctagcatgactgacaaagtaaaaagaagatagcaatatttggaatggaagatatcactgcatatcctgcagacatcaaaaggatatttagggcattttacaccacagatttgacaacacagacaaaatagaccaattttctttaaaaaaaaaacaccagtgacttcaacttacccaatatgaaatggataatttgaatagtagtataattattaaaaaattaaattgataactgaaaaaacccacaaaacaaatttccaggcccaaatggtttcactggagaattttataaaatacttaatgaattaagaccaattcttttgggaggctgaggtgggcagatcacaaggtcaggagatcgagaccatcctggccaacatggtgaaaccccgtctctactaaaaaaaaatacaaaaattagctgggcgtggtggcacgcacctgcaatcccagctacttgggaggctgaggcaggagaatcacttgaacccaggagtcggaggttgcagtgagccgggattgcgccactgcactccagcctggcaacagagtgagactctatctcaaaacaaacaaacaaacaaacaaaaattctacacaatctcttgcagacagaataagaggagggaatataatatagcccaattcattttatgatgcttcaattatcataatagtaaaactggatagataggaaaggaaagaaagaaagaaggaaagcaaggaaagatggcaggcaggcaggaaggaaaccacaggcaaatattattcatgaatatagacacaaaaatctttaacaaaatattagcaaatagaattcagcaatatatgaaaaggattttatataccatgactaagtggggttcattgcaggaatgcaaggctggtgtaatattagaaagccaatccatatcaataagttaaagaataataatcaactgatatgtcaattggtgcagaaaaataatttgactaaatttaacaccaatttatggtaaaaaaaaaatcagaaaaataggaatagagaagacctttattacttagtaaagagtacctacaaaaaagcaacaatttacatgatacctaatggtgaaaaactgagtgctttcctcctaagatcaggaacaatgcaaagatatccactcactacttttattcaacatattttggaatttcttgccagtgcaatttagaaagtaaggtaaataatacggatacagtttgaaagggaagagataaaactgtccctatttgcaaaggacatgaccgttacacacaaaatcccaaaatgttatacagaaataatcctggaataagtgagttcagcaaggtcacaggatacaagataaaaaagacaaatatgtaaaactcaattgtatttctgtatgctagtgatgaactcatgggcacaaaaatttaaaactataataccatttacaatcactcaaaaaatgaaatgcttaggtgtaaatctaacaaaacatgtataggatttgcatgttaaaaatcacaccacactgataaaaaacacaacagagatatagatatttaagagacatactttgttcatggaatggtagattcatcatagtaaataagtcagttctctccaaattgatgtacaggttcaacacaactcttatcaaaacaacaacaagattttctttataggtatcgacaagtttactctaaaatttatatcagaaggcaaaacatttatttcaaaagaattaaaatggccaaaagagttttgaaaagagaaacaaagtggaaggaactagtctacccaatttcaagatttaatatatagctactataatgaaatctgtgttgtattggtagaggggcagaactatagatcaaggcaacagaaaagggaactcaggcataaactcacacaaaatcacaaatatgtccaactgattattgatgaaggtacaaatgtaattcaatggagaaaagatagcttgttcaacaaatggtactggagtaattggaaatctataggccaagaaaataaaccttgacctgacttacacctaatataaaaattcagtcaaaatggttcatgggcttaaatataaaatgtaaactctaaaacttatagaaaaaaattataggtgaaaattgtcaagatttagagctaggcaaaatgtttttgttttgttttgttttgttttgtttgagacggagtctcctctgttgcctaggctggagtgcagtggcatgatcttggctcagtgcaagctccacctcctgggttcatgccattctcctgcctcagcctccctagtagctaggattacaggcgcctgccaccatgcccagctaatttttttatttttttatttttagtaaagacgaggtttcaccgtgttagccaggatggtctcgatctcttgacctcatgatctgcctgcctcagcctcccaaagtgctgggattacaggtgtgagccaccatgccaggccgcaaaatgttcttaatgacacccaaacattgatctataaaaggtaagatttataaattggacttcatcacaattaaaaaattctgctctgtgagaaaccccattaggaggaagaagaaacaagttattacctggagaaaatattttcaaaccaaaaacccaacaaggactactttttagaatatataaagcactctcaaactcaacagaaaaaacaacccaatcagaacatgggtcaaatatatgaagaggcattttactctaagaggatacatggatggcaaataagacatgaaaagacgttcaacttcattagccaatgggacaatgcaaattaaagccacaatgaaatttcactacacacccaccagaatggctaaaattgaagaaaagtaataacactaaattctgaagaagattcagagaaacttgaccactcatactttgctgatgggaatgcaaaatggtacagccactctgaaaaaaatagtttggcagtttgttaaaaaaactaaacagggaactaccatatcacctagcaattacactcttggacatttatgctagagaaataaaaacatattcatggaaacacctgtctgtaaatgttattgcaactttgttcataacagttaaaaactggaaacatctcagatgtccctcaacaggtaaacatccataccataaaatccagctcagcaatagcatagaacagattaatgatacacgcaacctagatgaagctccagagaattatgctgagtgagaaaagccaaccccaaaaggttataaactgtatgattctttttatttaacattcttgaaatggcaaaattatagaaatggagaagagattagtggttgccagagattaaggagatggggacaggtgggaagtgggcatggctataaaagggtcatatgagggattcttgaaatgatgggagggctctgtagctttgtcaatattctggtcgtgatactgcgctgtatttctgcaagctgttaccgctggaggaaatgataaatggtacatctgatctctttgtttcttttctttttctttttttcttttcttttctttttttcttttcttttcctttcctttcctttctctctctctctctttcttctttctttcctttctttccctttaagagacagggttttgctctgttgctgaggctggagtgcagtggcaccatcatagctcattgcaaccttgaactcctgagctcaagccatactcccacctagtctccgagtagctaggactacaggcatgcatcaacacatctggctaattttttaattttattttttgtagagatggggacttgctaggttgtccaggctgatctccaactcctggactcaagcgatcctcctgtctcagactcctgaaggtctgagattacaggtgtgagccaccatgcctggcctttttgtatttcttataactgcatgtgaatcaacaattatttcagaacaagaagtttaattaaaataggtatgacctctttgctgatgaagtttataatagactggaggagagaggcattaattaaacctctaggcaaacatatttagaaattcaactataagaatgcttttaagaagaggtgtatagtaccaggagaacatataatagatggggtgatcatatgatttagtgctcaaaatgggatactgttgagagtgaaaggggatgctattagtaagtacactgggaaaatgaacctaaactgggacatgcagtcaccttaataataggggagggagatgcgtcctgactcattcagtggggccaagggaggctccctgaaggaggtgaagatagactgaggaccagaaggaagataacagtaaatcacgcaaggtggaggagaagagcaataagagcaaaagtcccatgccagaggggcgcccggacctgtggaaagaggagtttggagttggagctgctgatggattctgcccgactcccagggccgagaagcccctgcgtggtttccagcaggaaagccctcatccgggatctggctctgattcctgtgacctggacgcactctcccttctgctgccctgactggggggtgttccgtcgtagaccgcgtgtttgttttgaggctatatttagtttcctctttgctctctctgccacgcttgaacaacttgccaaggatgccatctctcttacgtccgccgtggtgctccggattctgactcattcggacgaacgggtcggggtcgcggaacctgcgtgcgcaggtggtcacagacgcgtccacggtacatctccctctccatcctgcagctgctgaagtggcctcgggccattcctgaaggttttgtcctgttcctttgcccagtcccacgcttcttctgagctgcagacccatctttacttggctgttcctgctcctatggggagctcctcgttcctctcggtttctccaccccgggtcctctttcttgctcttaggaacggcccctgccccatcattggccctggacggtgggtttaactctctgagcatcagagtcccagcctgtagaacagagatactcgcccgggcgctgggcttctccaggactctgggaagattaaatgggggagatggacacatattcacctcttgttcagagccatagcattgaagccaggcatcaaggcgatttctatgaagttatttgctcttgaagtctaatctcacctggggaaattaaaaggtttgctctctcatgaaggaaatcccgcatcattgggcagaggaagatacttcttttgggggggtggtggagttagggatggatggtaaaagggggtctaataattatttattaagtccttattaaatgtaccagacactattcaaacattctgtcattggatcctcaaaagactctttgagagagggacaaccgatatcttcattttacaggtggggaaactgatgctgagacgggttagacaccaggtaacatagctggtaaggcagaactaggatttgaacgccactctttctgaatccagaatctttgtgtttgaccactaggctctgcagtctccctggagatcatgtctcatttctactccctgaaaacacaactgtctgcattttctctcttctccccaacacaactataaccaccacctaggtatctctactctttctccttctctcatccctccctcttcttccttttgctttaaccacttttccccccagttgtattttcttctctgttatgcacgccttaacctgccactggcacccggggggaagaggtcagttctgcttgggtctcactgtcactgctgcctggagttgcccatggttgtctaatctctttgttaaacttggtgtagcaagttggtgatgcctttttaaatgcaaatattatactcctggggaagggtacattaaggcatcaccatttaggtatgaattagatgcttccttgtctatgaactttgatggggaagcacagaataaagagtgtgaacaggaaagggagaccgggtgcaacagactcattttcagcatatactggcttctagaaatcagaactgtagcttgcttgggtcaggaagatgccaaatcgaaggagatcaaatgtgtaactatattgatggcaactaaaacaacacacccatgccttcttttatgtagctctttaaagtttgcttagtgtttccttgtaaactgcctcctttaatcctcaagcccagttataaccctgttacaacaatgagacttgttagaacctctcaagtaacaccggtgaagccaggactagacttccctatcttcatattcacctcttctagataacctcctgctttttattaaggatattctaactaaattgcccaaatcttctttctgtcttctgtacaagttcattctttccattactctttcattcagttgacaagcacttattgaggatctgccattaggttaagcttttgcatatattctttacttctcaaaaaccacattatggggaagatgttaaaatactttcttttagtatgggaaaatggaataatgtatctctctctgccggactgaccaatatctcccactgtgaacctctgaagaccatcaccattagtatcaagggcatgctttccatagccagcaatggagtgtaccagggataccaggaaggcccattcctggaggacaggggacttttccgatagtgactttgactcagaaggggactccttggatagtaaatgactttgactcaagaacttcccattagctttgccaaactttttagaacttcctgggaatccatgataatttaagagcaatgctgtaaaagacaaacttttctctaagaaatgcagctttgcattgtgaatcattagggagaagaataaaatgaaaacctatttgcctgcaaaacttcttttccaactacctccacctcattagattgatgtcttccttttcttttggagatgtgactagagggaaaatgtcaactaagttgctgatgacttttggcagcttaatgagtatgttctttcccagaacttgttaagtttccattgttgactttacttctttagcccaaccttgctacttgaacacaggcctggaattcaccaaccataattttcttttctttaggaggtaaatggcatctaaagagatggatgtcaccaactaaatcgccaacctcttcccaaattgtaaggcatgttgtggaagccatgtgcccagtgaggaccagccatcagtattagtcctggtgatatgttcctgggtgccaagacagaggatgcagcaggaagaactctgacttcagagccaaatagaccaaaatgtaaatattacctgaggcatgctgtgggatgtaggtcaggaagacagtgtagaccactgtgtgagagctgtctggatcagacagatcctttagtttggttactcacaagctatgcaatccaacctctctcactcaaagtttcctcatctgtaaaatggggacaaagtactagcctccacaggactgttcaggagaataagaacatttatagccaaatttatctagcacttaatcttcgctagaccttgttccaagtgctttatgccattgattcatttaatcttaattgtgaccccctacattaagtattatcaccatctccatttacagatgaggaattgaagtatagagagattgatttatcgaaggtcacacaactggtagttggtagggctggaattgaaacataggtaatttttctctaaagtatggactctcagtcactccaatagcatgatggtgggtccttaccatatttctagtcaagagttagtgcacagcataaattatcattcatcattatcttctacattatctcctctagcatcactgcttcaactgtatgtatttgtttcttaatctactgattggaaccaagaaatgactttgtctggattaagtgaagcaatggccataggagacgtattgcctgacttaaaggaagtccttattaaatgcgttttccaggtagctattttctgctctcctcttctttctgctgcctttttttcttccacttttccttcatcataaagtatttggcgccttgtggacaggattcttaatgttacttcctatacctataaccactgggcagatggtcacccctcctctattctccccttctccatgggagaagtgtttccctggttaagcatcgaattccacataggtgttatgttaaatgttacctcgtcaggattttgttttagtttgtttttctacaagaagttcaagatgaaggcaaacagagtcactttctttctctaagaaatgtttttttttggtgacaggtgtagtggacatttatcttgcttcatcctgtggctgcccaacatctgaactcccttctgtgtgtgtgggagactttcccacttcaggaggcagatctgcttcctcactgcatctctagagtaggggctagtgatctaggcttggccaatcaatgctagtgatacaaaaaagcaagcagaaggctagctggtgacaatggaggtggcagcaacattcagcattcaactcttgtggtgcttgttaaagctgtagcatctaggcttattgatgctggtaatagggtccttataggaccaattccgtggtgtgatttcaggtgtcattccgcctgcagaacccctgagcctagctttccagcccgcccagcaattttgggagttactcaatatcattttcataagataattttcttttttttctttttcttttttttttgacacagagtctcactctgtcacccaggctgtagtgcagtagtgtgatcttggctcactgcagcctctgcctcctgggttcaagcaattctcctgcctcaccctcctgagtagctgggattacaggtgctcaccacaacatctggctaattttttgtatttttagtagagactgggtttcgccatgttggccaggctggtctggaactcctgacctcaagtgatctgcctgccttgaccttccaaagtgctgggattacaggcataagccatcatgcccggctgcttttcataagataattttctccaaatttgtgttggagaattgttttctgtggcttgcaataggaacattgataccatgaaataaggtgtggtggaaagtagtatcaatcaagtcctagagcttttgcctctttagaaagttgacatgctaaaaagaacaggtggttagtagctgcagtggaggtattattatttacattcatctgttttgttttttattgcacatttattgagggtcatcgctgtgccaggcattgggccaggtgctaaggatacagtattgagcaaaacagacacttcatggacacacagtgacaggaagtcctaattgcagtgatcatctggctggctttgtctgcatttcaggttttgtttcataatcatttgcctccttagaaattcagagttacaatgtagactgttgtttgatgttaatcaattaattaatttcctatttagttctaaaaagaatgtgaagtggcttatcaaaaatacgcagatatagtaagatcaaagagtatcaaacaataaaaacagcatttagtaaaaagggagcagaggataaaaatcttgactgaagaccattagaacaagttaactcggtactcagcgtgattattgagacaagaggaagacaaagtgagaagacagagccagttaaaagagcctttaagaaaggatgtcagtttcacaggagaaatacacgttttaagagaaatttgcttttaggtcctcatgtaagaggtgctgaacattttataaaatacggaaatagggctgggcatggtggctcacgcctgtaatcccagcactttgggaggccgagggggtcggattatctgagatcaggagtttgagaccagcctggccaacatggggaaatcccgcctttactaaaaaaaaacaaaaaacaaaaaaacaaaaattagctgggcatagtggcgtgtgcctgtaatcccagctgcctcaggagtctgaggcaggagaatcaattgaacctgggaggcagaagttgcagtaagccgagatcgcaccactgcactccagcgtgggcgacagagcaagactccatctcaaaaaaaaaaaaaaaaaaaaaagaaaaagaaaagaaatcggcatcatttgaatgcttccctatctgtgcctgctgtgagtgctgatggcaaaatatctattagattattgagggtctggaagggtaagggtgtgtgtgtgtgtgtgtgtgtgtgtgtgtgtgtgtatgtgtctgtgtgtatttgtgatgtcagggagaagaagcacagtttcccaaagtgttatttcactgtgatggtaaaaaacaagaaacaaaaaacaaaacaaaacaaaaaaccggaaagaagacttatttgggtgacatttagtgtaatctcatggataacttacagtatacagtttgctttctccagttgtttttaacagggacagaagccctggtgagaaaatgcattcccagtgggcatttgttgccgaccctatggggactgtgtgagagctaatcctcactctcaacctgcctttcccagctgaagtaggtattatgtcagcaagggaaatggaagccccctttaacctttgtcctttcttttaaattccaaattgatatgggacagctcctatcttataggaagacaaagaatttgatgatgatgacatgatgatggtaataataatgatataataacaagtactatgaggctgtggaggcaagctccatggaagaggattcttccatgaagaagggttcttaccatgaagccccttccatgttgaatactgtggcagaggacacattccaggcttaaggaatacagtaagaaagttcatggaggtggggcaagtacatggagctttggataccattctaagaagtttggattttataaaaatggtaggtcattgaaaaattttgaggagggcaattcatgatataatcttccttatgttttaagaggctatttctgtcaacagtgtggagctgtgttgtttaaaacagtagccactagtcacatgtggttatgaaatgtggtagtgaaaaaatgtgggtggtctgaacggaaatgtgctgtaagtataaaatacacactggattttgaagacttggtacaaaaatatgtaaaaatacatcaataatttttatgttgattacaaattgaaactatttttggtatcttcagttcaataaaaattaaagttaatttcattggttcctttttatttcaataaagctactagaaagtttaaaatttcctgtgtggcttacattacatttctatttgaaggtgccagtgtggaggctggctaggagaaggaaagaaccgaagaccaggagaagagaggaaactattgcaaaaccttaggcaagagatgttgagggtcagatataaggcagtgactctaggaatgaacaggagaggagtggtaaaaaaaaaaaaaaaggctttttaaaataggacgagacaagttatgggtgtggggatccaaaagagggagtcaagcttgcaagtcaagtgtctagtctaggtgactaagaagatgttggggtgatggttttaggttttgctgcatatgggtttcaaggtgaacacataacacgtatgaagcaatgaggaagtcaggtgtgaagctcaagaggggatgtggtgaagttgtagatccaggagtcaacaccaggaaatggtagtagaaggacagaaatgggcctgatctccgggctcattcagacaaggagaaagggaaaacagaatgagagccaagcacggagaattggggaaaatgatggaggctggggctcagaatttaagatgtggataaaagaggacaagcttgactgaggctggccagggaggacccagaagatcctagtaccatgtagatcaaaggagaccttttcagatgggacaagtttacacatgcgggaagaagaggttgttgagtgaggctgtcaggcgtgttggggtaggcctttgactgagtcgcctaaaagcagatgtcaaattgcaaaaagtccaggagtgaggaagaggatactgtgggttcaggtgagaactactgggagaagtttgggcactagagaaggctaatggggactcggaagcagggggttggaggcagggggctgggggtgggggcaggggcagctcagggctgagggcaaggattttcaggcaaagggtgaaggagggagaggctgcaggtggaagaagactgtaattgatgggagcaaggccaagaaaacgaactggtgcaggaggcatgtgaaaatgtcacacttgcgggagtctttccttttttgtttgttttcaaacaaaagcttttaagctacatctcctcaagcccatcccaaggatccaactctgcccgggttccatctggtagggccttcttcagacaggagagacagaaggaggcccctctcagagcgtctgcctcttttgcacccgactgctcctgctcagaggccgcgggaagctgcggggactggatggtgcacctccccagtgcgcataggacttgggagaccacactcctccgggctgtgtgagcctcgggtccgcccagatctcttatactgtggcacctccgcccagagcctgaagagaagagcagcaccgcgtccctcccgaaccccgagcttcggctcgggctgcagcgccgggcctcctccggcaggggcgctgggaactcgcggatggccggctctcgtccagcgcccgatcccgcgcccacctgggcctgcggcgctggaacttttcttaggaatacccgctactccctgtctttggaaacccacagatgccaggacccgcaccattctgggccggacgttgtcgctggcttggttctttggcccagcctcccccgctgctaattgccattttggcaccgggtggaaaggcaagttcaagagggcgggggctctcgggaatcgctggatgtcttcttccttggccagcttagattctcagtcgcctcttctgcctcctccatccctcttggctcttacctggcgccctttcgcctcctcttctatctccctcttccttttgcaccattctctcgccccttttctccttcatcttgtctttcctctctccccttttccctctattttctccttcattccttcctctcacctttctttcctctccgcgcattcccctccctctcgctccactttaaccatcttctagagaggaggaactctatctactcccgaaggggaggagcagggctggaggctgtctctctctccctaagcctcctccctcctgcctcctcctttcttaatagctcctcctctagctcctctagtctcagacttttcaacccctagaatcccaggggcttctcggaggcggcgagctacaccacatgtcctggggcctgtaaaccgcagctcgaggtcgtctgtgggtttagctcatttcccttcagcccacctgaagtctccttcttcctacggtcacgaaggatctcagctgcaccaagcgcgcaggctacactcctgcagtagcggattggggaccagataagcccacgcggctcccgcctgagtaccctcttaactggcggccgacactttgaaacaattgagtccgttcagaaacggactggggagagtgagggcacgacctcaaaatcctaggcagcaaaatgaggtctggatcctccctggaagaacagacatctcgactactctctcgccccacctctggccgggaggtcggggcaaggagaatccctcaaccgagaagatctggcaagtccccgatcccaccggggccttccgcctcttttccctcatcccctaggaggctttatcaggttctaaccgcttgtagtgggggccgtgggtgctcggggcgccaagaggagggggctgccgagagcggcctgcctagttctcagcattgcctctttgaccactcgcaggctcctggaaatgcaaacacagcccgtgcgtgatccgcacgcgaccaaaagccgagcgcacacctcccgcccccgccccacttgccatcgctcacactaacgtgcacacatgctcgtgcaaacgcgcacgcacggaaccgcgcgccccctcacacccagccgcgctcccggcccggctcagccaggtgcccccacgcggcagcgcccggtctgcccgccggccccctgcgaacccctcgcctcacgcccgcctgcctgcgcgcacgcacgcgcacgcacgcattccccacgcccccgcgcgggggcgcaggccttgggtggcggggtttggccgggagccggccgggccagggagcggcgagcagagtccagggtgcatcccgcgcttggcttccgtgcgcagcctccccgcgcggaggcacctggctccctctcggctctagaacgcgaacagttggcgttgagcacacaactcctcctccttctcccccgagacccctgtaccctccccgcgcgccatctcccgcccctcataacaggcccgaagagtaaacccccaaacgcgtccagaagcggctcccaactcttcgccgggagcacgttggaggctggatttcggagagactcgggattggggtctattgccggcccctcctggatccggcttgattttcatattttaagaagattttcttattacctttgattactcctttttaccaaatttctggaggagctcagtggggaggattggggggaatctgattttaagaaagaaagcaccgaaggggcaattattaattttcctcgggtttggaatcaccctctggacaagagaacgggcgagcgggagctaggagggaagagtggagaggaccggcgaggcgcgccagccggagccacctccttcccggccgccccctccccactccccctacacacacacgctcgctcgctcgccggcgcgcgcacaccccccgcgccggacccgcacctcggcgggcgccacacactcggcagcccgagccgcggtagccgcagcgggatggaggcggcgcgcacggagcgccccgcaggcaggccgggggcgccgcttgtccggacggggctcctactcttgtcgacgtgggtcctggccggcgccgagatcacttgggacgcgacaggcggtcccggacgcccggcggccccggcttcgcggccaccggcgttgtctccactctcgccgcgggcagtggccagccagtggccggaggagctggcgtcggcgcggagagccgccgtgctggggcgccgggccggaccagagctgctgccccagcagggcggcggcagaggcggtgagatgcaggtggaagccggagggacatcaccggcaggcgagcggcggggccggggcatcccagctcctgccaagcttggcggcgcgaggaggagtcgccgggcgcagcccccaatcacccaggaacgcggggacgcctgggccactgctccggccgatggttccagaggaagccgtccccttgctaagggttcccgggaggaggtgaaggcgccgcgggctggggggtcggcggctgaagacctccggctgcccagcacctccttcgcgctgaccggggactcggcccacaaccaagccatggtgcactggtcgggacacaacagcagcgtgagtacccacccggcggcgggtccgcctgtttcctgacaccgaaggggaatgggggggtgggtgggagcgagggacagatagttgctcgggggtcgaggcgggggacgcctcgacttttcgagataacaggtttgtccgattccccccacgcccccaacaggttaacggagtttgttgttagacgctgtgtgtgtttgtttactggagaccctaggcttcggccgccgggaggggagtggaggaaggggcttcttaaagatgagtgggggagggatctgtgctcactttctccaatacttggcttggagggtcagttttcctgtttgcggggtgcttgaattcttggatgagaaaaagggctgacttggggcgggagccgctgaacagaccgattcctgcggctgccgggctccccctacccccaccccacccccaccccccctcccgtcacgcgaaagggaacccggaaggccattcggactcccagcctcctgctcgcctcggggtcgctgctatccgctccaggcgcgcagtcctccagcccaagagggaggctcggccaagtcggcccccagccttggccttcaggtaaccccggttcctccttcaaagtccagggagcggccctggaaagccgtagcagaggccgtaaaaaaaagtttaaagcgtgaagcgaaattccacacccatccagcgctcatgccacaccgctcgccctcacgcacgcacaggcacacggaagtcgctcagcagaaaactctcgacttcaccattgcgtcctgcgccacaaacggctccctgagcggagttgggtgcctgagcttcctgcacacctctccacccgcttttccccgccaccgggttctcctggacaaggatgtaccgagaggtggcgtcgttgagcccggtctggcctactccggcattccgaactgggcgcccgactgagcatcgcgcctgcctggcagctgcagcggcccgcagcgcgtgcccggaggggctccccctacctcgccggcacccagcgctgtgcagccaagcaaagaaaaggcgggggacaggttcccaccatctccccgacttccctccctcccgcggtccctactagagccagatttggaaaatcctttcctcttctctggctccatggttcagatcagaacctggcgttgggtagggtgcacgctccaggcggaggatgacgggtgtctgtacaagcagccttggggaactgatttgataggaactcaccccgcaactccctgccgttttgtatttctcttcatgaccggtgtttgacaaaatttctctgggaaatttttgccttattttaacagagcctgggatgtccaggattgggtatctaataagaggaaagcgaggggtccgcagaaggtagtacataagcaataccaaagtgcagatttcttggtttctaatgatgcacagcgcgggcagcccagcctgggtagcccatgctggtcttgaaggaccagtgaagtccagcttcgcagcagcgcgatggcgggcttcatctgcctgggatgaagacccccgtagcctcgggctgacagctctggcgagaggggtggacaatgtgtgcctttgcagggctgggtgattgaagacttccaagtcccttccaagaggacttggatatgtgtgtgctggggggagattctctgacctcagggttgattctctgacagcaggggttgtgaatcccaacttcattttagtttgataattagggtgtgtgtgtgtgtgtgtgtgtgtgtgtgtgtgtgttggggttcttacttggtgaggaggatggatggatggataggatgtgtggaagtaaatatatcctaggaagaggaggatgcaatgtctttacatctgtggcttccctactgccacattaggacaatataaattcaccctccctgaagagtttttctgtgtctctgcttttattttaaggattatttttgagtatttacaaagcctctgaagatgggactttagagaaaatgcttcctgcaaatagcagttaactgtgcatggccttctttgctcatcttcaaagcagttgtgcagcagaagaggtgaggggcaggtctggcccgtgctccctggggaaatgactcttcagtcaaatgacggccaaaggggcttggggactggagcagttgggcttggagaccttggtgacagcaatgagattggacaatgtatgaacagcccacagggacttattggttgtgctcttggccagccttactgcccatgcaagagcaccacaggtggatgtagggccacgcactgtcctctctctccaatctggggaataactgcctctttagcccctaggctggacctgtctcttctgaccacattttgtaggcaatacgagagagagatccttgattatcaggtctgtgagcctgtgtaaagaagatggagaagcatactcacatggccctgtctttgagactttaaggaaatctcctggagagtcactgggaaaccagtttcagcaacattgacccagctggtttttctcctgtccccctttcctgatggcaggaaaagaaggtgttgtaaataaaagccagggtgaagagtgatggggatgaggacactttgggaagattccttcatcattggtttcaaagtggagggagatgtccgtaaaacagagaacatggggcctagctccaggctcttatgacgtggaaagagaattttatcttttattctggcttctggagtattagacatgtccttattcaggaggccaccagtttaatttttaacacaatgagggtttccttgctcttcttccaagtgtctctgatgcacctgattgcttgatatgagttcccttttggggagcgttttcagtaaccctatgaaattgaaaattgaactccattctgactgagtttacagtcagggatgcagggtgggacatgaaggagaagggccttcagcccaccccattggtccagtgtgtgccccaggtggttgagggtgcaggaggagacccttgaccaaggcttgggctgggtatttgccttggtcccaggactgagaagagatggctttggggacaaaggagaaggagtgcaactggctttgggcaaaggaatcaggagggcatgggatctgggtaccacctcttgaccatgttgcctgccaggtgctctggctggaaagtgagtggacttggccttggaccctttactctggaggagcgatttgctattttttctctccagttgcctccagctggaatcctggtgattaatgggttagagagtgtttcaaaaacacccagagggagcccagtccccgtggcttacagggaaacagaaaaacacattattctgtccttttccttcaaatgaaagaagaagcctccctgcttgctcagtgagttggcaaatggctctggagagtggaaagttgtgaaggcacagtccacttctccacaccccctccttcttggattaacccttcatggggcccccattcctggtgccaaggtgaaaacactgcatctgccctcacattggtcttcatttccttccagcagcgcactcgaagtggcagcgatttgcaggctgctgcccctgcagtgtatctgcttggaatacttgccaggtagttctcaattaatgggcccaacactgcatcttggtgaagagaaatggggagatgctgatatttctaggccctcccagatcaccctgccctgagcgtactagtaggtgtaacacagattctcccaggcaggatttcctacccttaactaattcagctggactgtgttctaaaatatttactcctaatgtgcaaaatagtgacagatttgatcagattaattgtatttcactcactggatcatctaattgtggctcccaaacagatttttcaaatagcttttggctggattgcttgtcttcatcctccctgctcacagttcctgtgtcacaatatcttaatgcattctgcctttttggaggcttaataaagaagcttgccacagaagccattcttcagggttttgccaaaaaaattgttttcaattagtattacaaggggaaaccatctcagttgagatgtagctgggaaatgcatggggacataacggtactaattgctcctggtcattgttggtctgaggggccgtagggagaggaggagctgggcacagcctatttatctgctcagtgatttctctgatggctggattacaggatgtgatttccttctcagatccttcagtgatttccaaggtgagcagaagttgcagattccttaattgggaggcctgatttaatgattacagaaatgcagtggctggaacttgctttgtagctggcaaagaaggaatgcccgggagtggcttctccagtggtgttggatttaagggaaagggagggtgacttcagtggcaggaaggctcagtggacagaagggaaaattgctttttctttgggctgtgtaaatctattgtcagtgaaggaatcctggaactggatgatctgtgggccctgaatcatctcataaggagcagagaggtgcaacaaagcagacactctgtgatagaaagatttggctggagactagtggtttatccaaggctaggtatagattggctaagtcacttaaggcctgtggcttgacctacctgttgatttcccgctttctgccttcttttggcctcttggctggtttgagacacttcccttacagggagaaaatgtcaaaggaggattctgcagtaagtttgaaggagaaaagaggccttgtggaggaggaggtgggagatatagaatgtgagtgcctagtgggtcactaggcagttctggtaagcagaactggctctgtgggatggatcgaatttggctaaccaagtttattctcctggtgttgtgggtaactgagaaaaggctctggatagggctctgactttgttggtagtcagtggagatgagggagctttgccttacacatggttggcacttgataatgtttgactgagtgaatgaaagacagtctcaagtctcatcaagcagaggctataaaggaattagaaattgttgttgcctgggatagcaatgatttcagaacttgacagctaccatagccaggagtgtttcatccagtgtgtctacattctggcttgaggaacttcggtttcttaaattcagatccagagtccattagcctggcattcaaggctatgtatgtcccgggtctacttctccaactttggatttgactcttccctgattgactcctgcattctggccagggcagcgtcttcattgtcccaagcatcttgaggtctgttccacttggggtacccttctttcttgatgaaagggcacctgttattcatagctcagttcaacattcagactcagtggctctgtgaaactttccttagaagcatttatttctcttttcccctacttgtttatagaatttgcagagtgcaccacacattttgtcatatttagtttagtacttactttagtcttatattatttggtgagtgatttgagggtaagagctgaaataattaaaacagcaccccttccctccaatcaccatcaagtgcgagttctgttcttctcatccgtgcctggcagcatgtgccgtagggtagtacatagctcagtaatactgaactcacctggggagttggactgtgccttagctgcagggtaagaggagaggaaagaagatcattttgccctaagataactaacaggttaacactgtctcttaataacactgagtttagacaactggtgtattatttcatgtatgaatgttaacataagattcagaggggtctctacactacttagtaagaggatagaaataaggactagttaacaatcctggcttctcatggacttcagagatcagatggacacccccataagacattcatccattttctgagtgtttcctgtgtatgtggcattgtcctagaaactgtggggttggtagaagtgtgatagagaggagacaaagaaggataagacagcatttgcctcatggtcctgccgacatgctttggatgtgagactgctcttctgtaaagttaaataacacatgacaacaagacagatgccatggggtgatatgtggttaattgtcaagtgatcgtttcaggctatgagctcgcagaagagaggatccctgtgggacatactacaggaatttgagacttgcagaatgtcaagactggaagtgcacttgggaattgtcttcatcaaatcactcatgatagagatgaggatatgaggctcagacagaaacatggcagcctgccttggaccctgcttatttttttttctcttggaagagccatcccctcttcacacccatttttctcctttcttctcaggttaacagagcattttccttctaagaggatttgtgtgttttcactctgatgaggtgcccattttataggtaggatagattgaggccccaggatgggtatcgtatgaggctagttagagagatttaggaatagattctttccttctgttctggggccatactctatagtcaacctgcccacccaccgcggtggctgcagacaatgaataacaagctagttaatgttggacaagctgtatcttactaaccattgttaatgggggcctcttgtgagtcactttgtaatttgagttagtgagtgaatcaagcctggttacatcacaaccaggaatattttgctcatttattttgatcagtgtagtttggatttaattatttatagaaatactgttgtttatagtacactaataaatgttctatagtaaatttggaaaaaataatggagtctaagaacctcaggattgcacagattgttttctgctattgagtgcatgcagggaatcagaggaagccatccctgcttggttgagatgagagggacctgcagcagagtggggccagcagggttcttggtcagtaaaactgtgcccttggctaagtaggggactgttacttggcatgcactggaaagagaaaaaaccttctttaggggaaaaactggaaataaagctatgtaggataatcaaggattatattgggttgtgggattatttagtatgggtatatggtacaacttgtgtgaattcatatttgtggagagatttcatcatgaatgcaatcctcttctggatttgttgagaacagatagactgggaacctgaaacaggccacatactaaataagatcaatggattttgcagccaggtgcctgggttcaagtcctgcctctgtttcttaatagctgtgtgacattgggcaagttgttaccctctctgctgtttcttcatctgaaaaaagggagtgatgatatagtatctctaccttgggctgttgtaagaattaagtgagactgtacagggcagagtgcttaaaagaagtgcctgacccatttgtagcaagcactcaagatactttagtttagttgttatttttatatctggaaggggccttcccttaattttcagatggaaatgttgaagcagaggaaggaggcacttgctcaaggtttcccagtgagctgatggcaaggccttggctagaacccagttctcatcaagatgctcatttcaaccacctcccatagttcatgtccccagtcaatgagtctttgccatgtctatcttttatgtcgtgctaaagtagacattgaaaaggatctagaagtgaatgactggggacctgtattcttgaaattcatactcagaatttgtagtagaaacagaataatattcattagatgattacactaataagctatgaataaatttaacattatttcggggcttttattgcatggagagttaagggatccagaaagatgaagagtagcttctctcagaattggcatccatgatacaactcacagctaatcaagggagacttcttgagggaagtgagtaaagtgtgtagctactagaacattggagaacactgggttgctggggctggttgacaagcagatcccattgtgccaaagactcatgtatgccaaagtcatgggctagacctcaatgttacatttttcctttcctcttctgtatttgtgcctgttgtgaaatgggcatatcacatggattggagctatctgtagaatatctgcagcctgttccccagaattatcacactggtacaatccactactttgtggtgatctatacccatagagttgtaggcttgagttccctttttgccttcaccctgtgtaccaagagtggaacctgagagccctacatagacactagagggagtgttgccctgggaaagaagtgaaaataaataggatgaaataacaagacaatgctgtaccaggaattgttccgaaggagggaagatgaaaagtagactgtaagtgaattgtgtaggggttgtatgatgatccatagatgaataatcatttggcagcaggacagttttcaatcctggggggggctgatcattcagcctcttcctacagaaaaaaggggaatagatacaaacacgttcattcagcagttagatactcagaccattaatgaccaaactaacactctacaaatagattcagctggaagtgatgcttaggctaggttctcccattgcttctgtatttccttcctttttgcttccttgctctcttgtatctggtggttaagtcaataggtgcttattgagttgaacagaataaatacttgcttaaatacttaaaagtgcctgggtaaagaacaagtgtcttggggatggagtagtgtctggcctgctgttgctggcctgggatctgcactctgggacattgcggctgtctctcacaggctctcaggtcccacgtgcctgacatcctcccagaagcctttttgacatctatggtgaggtaggcagtttctcattcagatggttagaatcaggttacagattacactgctgcataagaaataaactttttcttttaaaaatctgttctcagtgggagatgaagaacaatgactgagttgaacattttcaagactagaaaaatagctcaagctgccatatctgaatgtgattacacatagtgggggaacttgtctacaataagagttctgagacaatgaagctggtgacacagataaacttgttttccagagtggtggtggaagaggagggtatccttagtggtgaaagagttgcttatctcactgtgttgctttcagtgttattcatgcttgaaagcaaacttttgtttgaaagatttctcaaaactctaaagcgtcttttctgtcatgagaaggtccctaagccacagcaatcttgaacaagtctctaagccttagtttcactggctgtaaaatgatgataatactggaattgcaggattgttgtgaatcttagagatgatgcctataaagggcctagcataataggctattttaacataagaatgttaatttttgtaattccagtactttgggaggctgaggcgggcagatcacttgaggtcaggagttcgagaccagcctggccaacatagtgaaacctccgggctctactaaaaaaaaaaaaaaaaaaaaacacaaaaattagctggtggcacatgcctttaatcccagctacacgggaggctgaggctggagaatctcttgaacgcaggaggcaggggttgcagtgagccaagatggtgccactgcattccccagcctgggtgacagagtgagactccgtctcaaaaaaaaaaagaatgttaattctcatttggagatctgttggtactctacccgtattcccggggtgttcctttgctctgcatgctggcctgatttccaaccaccagcaccagggaccagctttccctgatcactgtagcttgctttgatcacacaaggtacaggctggaagagtcaaggagttaatgcctgtgagggagcagagagcagccactaccaatgactggtaggagttgatggataaatatctagcccccttgactactggggttggctaactctgagacatgtttctttcatggtttcccagagctccctgtgggattaaaccccagttttaaatatattttaaatgtgtgtgtgtgtgtgtgtgtgtgtgtgtgtgtgttttaaatgggtgcattattagtaaggagagagcctgcaagtatgatttaaaaaaatggaaaatgcttctttcaagcatgcctagatttggtcttacttcaagcagatatattttcattcattctttcgctcattcattcaataatttgtttgcttagtatgatgccagttaagttatttgaattttctgggattcagtttcgtcacctataaaatgaaaaagttgcaaaaattggtgcagcccatctcaccacaaagtagatgtgatattaggtcagtcatttcttgatgggtaaaatgggcacaatcctgtttactccctttatgtcacagttaaaaaatgagatggtgcacatggaagcattttgaaaagaatagggggtgatatgaactcaagttgttagtttacctcacctctccttcattccttaaggagctagagaccctttgacaacagatttgagaccagatgcagctcttgccttcttctgccttctctcagtacaaatgaacacttccattaacacgcataccatggtagtaaaaaccccaagattcttattccaggcgtgttgtacaatttttttcaagtcacgtctgataataataaaattctcagatgggagtgtaatttggatgttttaacaaaacatttgccccaggttgtgacctgtattgattgctctgccttactcttttcagatcatgtgaagtgtttcagagcacctagtatatgcctagtgaggcagcatgtgcaaaaaaatctatgtgatgcagactggacacccaagaaaacttacaattttgtgtgtggtaaacatatgttggacagatattgcagagaacagtgtgagatagcataagacatgtgctaattggagcatgcttaggaaataacttgaacataatcaagaccacagtgaatgaaaattaatgaaattattaaaaaattctggttgtttttattatctgcaacaaaatctactagcacaataagaaatagatgctatcaccaaacctgggtcacttgacaaggagtgtcctgagctttgaggtcaaatagattacctgttgttctgacaattgttcagaattctgccatgtcagtgtggtgtataaattgcttacagagaactctgttttaccgtgtgtttctacttgttttattttctttataggaagataaagaatatgctatttcaccatagtactatgatattccaactttttagttgtattattattagatattctaatttgtactgatttctttctttctaggcctgtttcccttctgtcatcttgagatttctatttattttactcttggattagtgcctctgttttttggatcccattcctctgttgtgggctgcttttcatttttctgtggcatatcctcaagtaatctttttcagagaatgcatgggaatgtcttggtttatacctcttgtcctgatagaatatgaatagatgtattttgactctcaaaagatccaggcttagatgatgaatcatatggtcacccagtgcttgggagatattaatgctttaaaaatttttaatttaaaaaattgtttgtgggtacatagtaggcgtatatatttatgcgatacgtgagatgttttggtacagatatgcattgcataataatcacatcatggaagatgggatatctatccattcaagcagttatcatttgtgttacaaataatccagattatactcttttagttattttaaaatgtacaattaaaattattattgactctagtcacccttttgtgctatcaaatacttggccttattcattcattttattttttgtacccattaataatccccacctccccctctcccccactacccttcctgcctctggtaatcattcttctactctatgcgcatgggttcagttgttttcatttttagacgccacaaataagtgagaatatgccatgtgtgtcttttggtgcctggcttatttcacttaacataatgacctctacttccatccatgtttttgcaaatgactgaatctcattcgtttttatggctgaataatactccattgtgtatatgtaccacgttttctttatccattcatctgttgatggacagtcaggttgcttccaaatcttggctattgtgaatagtgctgcagcaaacatgggagtgcagatatctctttgatatattgatttcctttcttttgagtatataaccagcagcgggattgctggattgtatgatacctctatttttagttttttgagaaacctccaaactgttctccatagtagttgcactaatttacattcccaccaacagtgtacaagggttcccttttctccatgtcctcaccagcatttgttattgcctgtcttttggatataagccattttaactggggtgagatgatatgttattgtagttttgatgtgcatttctctgatgatcaggagatccacttttaaaaaagattcttggcatgtctaaaattttgttttgctctcacattggcttggtggttcctctggacatagaaatctagggtcaaaaaagtttttcttggatttgggaagtacttaggttacttgatgcttttgtatcatgtgctatttggcattatatgtgtctccccttctactcatggactgatgaaggtgggaaaaggaggtacataacataagatacctctgactttgttcaaattagtgatgtgcaacccttgaggaagcctgatgcattaaaactggatttacacaaaatcggtagtataaggtgggggattaaacactctgcagagccatttgctatttacactcattatccaaataccttcaatgtaaaactcaaccaaaagaagtagttttaggcaggttgcattggctcatgcctgtaatcccagcagtttgggagaccaaggcagacagattacctgaggtcgggagtttgagaccagcctggccaacatggtgaaaccttgtctctagtaaaaattcaaaaattagccaggtgtggtggcacacacctgtagtcccagctacttgggaggctgaggcaggagaatcacttgaaccggggaggcggaggttgcagtgagcagagatcacatcactgcactccagcttgggtaacagagctccgtctcaaaaaaaaaaaaaaaggagtagttttatttatttaattttagcttcgggggtacatgtgaaggtttgttatgtaggtaaactcatttcatgggggcttgttgtacagattattttgtcatgcaggtatttaagcctagtactcaatagttattttttctgctcctgcagaaaaaatagccagcattgtctgttgttccttcctttgtgttcatgagttctcatcatttagctcccacttgtaagtgagaacatgtggtatttggtttctttttctttaaaaaaatttaaaatcatttttaaaaaccacagcaatagccaattaatatggtttggaactgtgttcttgcccaaatctcatgttaaattgtaatccccattgttggaggtggggcttggtgggaggtgattggatcatggagacagatttctcatgaatggtttagcaccatcctcttggtactgtccttgtgacagtgagtgagttctcataagatctggttggttaaaagtgtgcagtgcctcctgcccccactccgccttgctcctgcttcttccgtgtaagacatctgctccccctttgccttctgccatgattggaagtttcctgaggtctccccagaagcagaagcgaatgtgtttcctgtacagcctgcagaaccatgagccaattaaacttcttttattaaatataaaatacacagtcctagatgtttctttatagcaatgtgagaatggactaacacatcaatattcaatacatatttgtggagtcccctctatgtgccaggtgctgctggattctgagtctgtaatagtgagcagtgctctgattgagaggtacatgacaacactagggacatttaacttaggaagggcagagagggagatgcagatgagtggagattgcaaagatgtgcagggtggattaggtgcagaggtgagggcatagtgttctgggcatatggcttctgtggcagggaggagcaaggtatttgaaggggaaaggaaggacagtgtggctggagcagaggggctgggggatggtgagagatgagatgaagctagacaggcaggcatgggcaggactaagcaagggtttagttctttatcccaacagcaaaggggtggcctggcctggtggcttatgcgtgcaattctagcactttgggaggctgaggaagggagatcccctgagcccaggagtttgagaggcaacatggagaaactctgtctctgcaaaaaatacacacacaaacaaaattagctgggcatggtggaatgcacttgtggtcccagctactcaggtggctgaggctgaggtgggaggatcacttgagcccaggaggttgaggctgcagtgagctgtgatcatgccactgcactctaacctggatgacagagtgagaccttgttaaaaaaaaacaaaaagaaaaagaaaaaaagtaaagaggtgagccatgaaaaggtttatagtaggagagtgataaaatgataaaattaaatgtacattaaaaaatcactctgatcaccctgtgggttagagggaaaaaaggatgaatgctaagaggatgtagctggagaggttgatggcttggatggtggtagtgggggtagataagaaggagtccactgaagaaatatttggcagatgtagttgattgtgtcattagctccaattgttcacttctctttataactccctttgtatgggacctttgcagtgccctctctctgaatgggaccttcttccccatcttctaacttttggtttggccttgtgacttgctttggccaatagagagttggaagtgatagtgtgccagttctaagctcagttatcaagaagcatgtgtgtttctacctgtttttttgtgcctttggggtggccatgagaaaaacatagcctattggtctcaggaggaggatgagagacaactagtacatagccattcccagccaagcccacgctagatcagcccagcccagtccagctagaaccacgtagctgagcccagttatgatcagccaaccccaagctgccctgaatatttctgagaataaagtgattgattgttgtgagaataagtgattgagatttaggtggtttattttgcagcgtttttgcagcaggtaaaatcaatagaacttgagagattggatgtagcaaatgtgtgggaacataattacggtataaagtgaggctcacctgtatttcgagatcattagcctgctacatacatgctcagggatggacttaggagtgtttttttcgtggttgcctgccccttgcctctctttacaattcatggtttctttttctggagctgaatgcggtaggccagatttatagtccaaaagaattaattgtctactctttttccttctcactctccttctggcaggctaatcagattccagcagagcctgagagctgagtaatcctcagttccctcaataggggccttcagactctaacatttagtgtattcttgttggagttgaaatcaattttagctctgactgtgaagatagaatttcacttgaaggggtgagaaatacagggccagggattttcttggttttgactgattatttaaaatatattagttccgataaaatatttagcttttaaacaacaaatttaatatagggaattgtactttatttgttaatggaagttgcagggagattggtaggagttgtgctaaagtgcactgttgtgattttgcaaagtatagtaattactgtaatattttgttgaattattaatatctactatgcctacaggaacataagctttgcagctgaattcattttaaaattgcctttctcccttctggttttgttttgtgttttctttcttgtgcacttactaatttttaaagaaatggggtagggcagtgttaattatattgtatgaaacactgttgtcacatgctaactgaatatatgcttcttccaaaccggtttgcagtggcagattgagggatgctgaaagaatcatgtctggggagaaagggctcatccatgtgtttttttcaggagctgagatgaggagagaaaaatagcagagaggtcacatgtatgcacatgagtattatgtctgcatgcttctaagcagagctggtcctacctgtagatgaaattggtaggtgtttaggcatgtgtgatgaaacagcacaagtctccttttttattttgagatggagttcactcttgttgctcaggctggagtatgcaatggcatgatcttggctcacttggctcagtttgtatttgtatttttagtgtaggcaacagttcattatgttggccatggtggtctcgaactcctgacttcaggtgatccacccaccttggcctcccaaagtggtgggattacaggtgtgagccacagcacctggcctcaagtcccctttcttaattgccttaacagtgattacttagtgtctattatgtgctcaaatgagattattgtgcatgatgatgatgatgatgatggtgatagcttacaattgttacctgagtgggctcatgctgcaataggactctggatggagtgcagggttataaataagcactttttttttgtcttttgttttttgttttttgcttttgtttttgttttttttttggttgtgactaaactgaaattggaggactagccttcacatgaatatctgccagctttatgaaatggtgtaagtcggtcaacatctgagactcaagtttcctcatctgtttaatagttgcaaggatcaaaatgaaatcatgtatttgaaagggcattataaactataaatgtacagatatttttaaggaaatatcacaacatggtattaaattgtggaagaagttgctcatactcatgttgtgattttgaaggggagcaaggaggacttttttgcttgattttattttttcctttccagaatcttcacaattagaggaccatttttcatgttgaacattgttccctctaaggtcctcttaaaatataaataattcagagacaatatttagagctggaaagaacacataatgacctaactacatctttttcctgacatagaaaatgtgggcaagcgagattgtatagtgcccaaattcatccagatagtagaaactcccacatcaatgtccacttctctgacttttagtccagtgctctttctgtaacactctgatgcccattcgtattccattaagtttttagtccagagaatttccccccagaatgtagccttgggaagaataaataaatagatgactagtggggagatatcaggtttgggattcctttaggtggaagagtagtgcttggatcggaaggacctgatcttgaatcttagctccacccctgactaggtagctgtgacctgggcaagttacttttctgagacctacttctctcctttataaaatcaggatataatcccattttgcctggtctttgtgaggatttagtgagtttaaagggcttgccaaggcgcctgccctgtggtagaagatactctaaaatgagtaggaaatggttattgttagataagaggtcctggagattagcttgatctccctcacagttggtctgccttttgccagccattctttcactctcctgtgagggtgtgtattttttaagaggagaggaaactgcaccctccaacattgctggttcccttccccaggatcggggagggaggactatgtgaaaggcccctgcagagatgcctgcacagtgggggacactcctgcactggccagaggatgagctgggacttagcaatagcccttcctttctcttttttctcacacagcagcagctccagcccgatttaaatttcctttaaaggagctgaggatgataggagggtggagatgtgcatcttgaaagaacggcaggtgactctaaaaatgagacaaatcaaagctcctgcatctatagctgcacatcgctgtgtcttaggtggctctgcttcttattttaagttaccaaggtggcttcctgaaaagtgggtttcagttttttaactgagagtttattatcctgcatctgtgcatcctgccgatctgtgagctgggtaggacctattgtttctagtgaacttacagcatgtaaagcatgaccacctatgggttaacatttaggtagtggaggaacttctagggacagaagaaaacaggaaacaccccagagtctgagtcccttctcaggtatgggggctgggtcagcctttacctgaaataaaataagagcaagggatgcagggaagtgagctcctgtggccctcaccctcccctctacccagcaccctccactttccttctgacctagggaaaatggtctaatactggtcctttgtgtcttcactttttttttctgagcccttcacatttcaaatctgatatcctaatggtgaatgagttggggatggtttgggaaggcgttttagggatggtgactcttgaaatcagagcctgtgctatttgcctaatttttccaatttttagggctggcatcagggagaggtaggacagtccagacatctttctggtccagagatgcctatttcctgtctgactcatgcctgagcctcaaaaagctcccatgagaggagagccatgggctctggccaaagactggctcttctctctgtgttggtcaagtacttacaatgatggatttttcttggtttaagcggaggggcaattggggagagctttgctctgtaccttttttcctttttaaattttatttatttatttaaaatacatatgacataaaatttgccattagaatcatttttactgctacaactcagtgcctattaatgaagaaccacttaaacagtgacttcctcttgctctgttctttacacaattaaattatcttcttcagcatctgagcaaatatggggatttctagtttattcccctcttctgccttctcctgttccgtctctaaccattttctcttctttcttcccagaacaggggcccatggagttgggaatgaggacgagtcttgtaatattcagggataagaaataggggagtatttttcatctcccccttgacagctatgttatttatttatttataaagataatcatacctgctatcacccagagaaagatatgtatcttgctccaccaccctaacttgttctcctgaagcagggatggtaatgccaaattatctgctccttgaccatcatgggcatcctagcaatcagtgacatacctcaacaggcaagctgcccttgtccagtgcagtcttgacattgtgacttagttttggctaagcctttttaagaggagacttgcttgtacatagctgagatcaaacacacttcatagttgagttgttattacctatatatttattaatatcattgttatttaaggtagtatgatttgggaatatagatagatagatagatagatagatagacagatagatagatagatacatatcatcctgcaataaatagtttttaaaatatcttgaacaaattcctaattgcacttcagtactgtgatcgatgatgaacaagaaacagttcagacttgatctcggccttctgggaacttaaaatctaagagaagtatgtgtaggtggaaggatggaaatccaaatcaatattggaatcaaaagtgaagcatctggggatgggatccagcacttactgaaggtttgctgtgtgccgggtgccagttttgggtgctttatttgtgtcagttcatttttccctcataactttatgagttggaggttattactatctctctttaacagaaaactgtgatgaagagaagttagattatcaagctcacatggctaataagcttcagagtgggtaatgaaatagaggaaaatacagatgtaaggtagttgagtctactgtattattgatgttgaaatcaggatattacagagtttgtgagtgcggataggctgagagtatcagagcaaaagggtgggagaaggtaaagacatcagcttttatttcattttaaaatgacataattttgcaaaaataatagaccacaattaggatactcttactgtgtgccaaacattgagctgtaacttttgcattcagcatcttgtttaatcttcatggtgactcgatgaagtttctactattatgagccacattgtaaagatgagtaaataaaagcatggtggggctcaatacctgacccatgtcacaaagctggtgagtgacagagctgcaagtcccacgtggaccatctgacttgagagctccttacttgatgagttacagagcccacttctccaattcataccagccagggaagcaaggcctcagcaatgcaaggttgaactgctgaccccatgagggctaagatgggttttcagctcctgggcctttttgcaattagactggcatgttcttttctagaagccttcattgaatatttgtacttaagctctggtgtttccaggcaaagagcaagatgagtaaaggcttggaggtgagaagtaatagggtgtttttcggaactaggagagtcaggaagagatgggtccagatcacacaggcattgcatagcccactggcaaacttgcatgttatttttataggcactgggaactcttagtaattttaaacaagggaaacatgtaattagcagtggcatcaattgtcctcaaaacaccacaaaatccattctccctacttcatgggaggaaaaagaaaggctcagagaggctgagtttttgcctggagtcagtcagcaacttgttagtggaaggagcagcagaagcccacactgccgtctctccttccagctctgggagctgccggctgccttcctttcactctgcctgttcccttcccacctcttgcccgctccctcctggcacagtggagtcctctccatcattacagcagccagtggggttctgttgtaattaaaggaagccaacagggagaagcaaggcagagcaagggaaaaaagcaaccaccaacaccacacaaactccgtaacaactgctgtctatcgcctttcatgggcacttgcttgctttaagtacagcagagggaaaccccataggatggtgtgggaaagcaggttattaagttgccttcaggctggcagaggggggatttactccttttcttgtactccctaccctgcagtgcaaaactgatcaaatattaaaagttgaaagagacttcgaaggccatttagttcaacttctcctccaaggcagggcttcctccattgctttcctctctccgcatggcatctctgatatgttgttatgtggtggctccctcgctccccagctccccacattttctggatcaaagcttaggtagggatgggagacattttcactagcaaaatactggccacacaagcctgttgtcatttacggcaatgacttcagaaatgtttaattaattcatttatccaattagcctcttgctctctgaaatgctttttctaggttgctgagcaactaggacagactttgaacacatgcatgctgctgctgaatgaaccaggagctttttccttcacactggcagccccccactcctctttcttcttttatttttctggtgcacagtaaagaagaagatctctatcatcccccatccttctcgccttccccaccccggcctctctgaatgtgcatgctgcctgccttaacacatttccaaaggtaacttttatgccaagcatttgtcatggacaaggagaatgacaggatatatgggcacacagagatgcctctgtaaaataatgaaattatctgggctcaggcatgacttgggaagagctttgctggttgctgggggaggcgagggtgagggctggctaagggtaggctcagatgcattggggaagaaggtgcaggctgtcttggggtgacgttgcattaagtgcagcttgactaggcagcagttccatctgtctttacagtgtgtccttcatgggggaattgtcagccatccccagtctggagtgcattgtgagcaataaacaggagcggggcttaaggtgaaaatgaaaggaaaaatatcaacccaggagggcagcaaaatgccttgaggaatcatccttgacgtgtaacacatttccgtttaaggatgtgaaaatgccacaggctgcttcactgagttagaatgttagagatggactttgagctcaaattgccaccattcttcgtttttacagatgagaaaatcgaagctcagggaggataaactgtttgctcagtgtctcacagccatgtcctgcttatgtcaccacattcctcctcttagatttcattaaggggcccttgtccataaaattagtcacttgagtcatcaaagcttacttttaaaattttgactttattttggagtagttgaagttggcagtgaagatttgcagcgctcaaggatcttggcatctatctccccattcaccttgacatgtgtgtattgcagatgctaggggcgtgtgcttgggctcagtattcaaatatgaatgaggaagggtcccttgtcttcaaagacctcccccaaacccctcatgtggtggaagagatggacagtaaaggaggaaggaactccttctcagagacattaaagaagcattcagagaagaggagctgggcaatttgctgggcccagatcttacagtgaagggggctatggggatgggatcggggtggaggacattcctggtcaaggagacagcatgggcccagtaaggaggcatgagagatggtgacatgtttgaggactggagagtggcctgggaatagagccttccagctgtctggcttttctctgatgcatggtggatggtttggtgctgcccacaccgacttctggaagacaccgcctcttgctctctggaataataagaaagcacagttatctctatgcatgtatcagtatgaaaaagcatatgccaggattcccggatggaaatgacttccctttgaagttagttcataaataatgatgaagaccataaaagtacacatgcactgcacacatttagctactgctgtggactgtgcttgctgggagcagaaccttcaggaaaaccagctgcccagagaaagaatgagggactatacattcgctaaagcacgggctcccagagcctcctgtaggaccaagggagaccttttatggaacagggtctattccacggcactcacaattgtagtaatcacttagtcactctgaaattccaagagatagtcagagaaaaaacatggcctgtgacaatgattgccctgaccaagcctttccaaggcagcagatgcttctttacttccaagcattgcccgtcatgatcaagttcttcctccagcagtgcagccacgtttccctggtggcagacattccttttccaaggttgggcttgcttttagagggcccagagatggcaaacagcattgtgtagtgctccttagtataaactctcctctgggattgttcttaacaaggtggtttgagtttctctaggaattaagctggggctggctattatttttctggtaagacttgttactctaaaatgcatatggggccaaaatcacaatagtcttgtctttggagcaatcagacgcacatggcaatctaaggctctggtaaggaagagtccgtgggttcttattcaataaatatttaatacattgggctttgatggatgtagacactgtctgcttgggttttcctacaccaaaaggtgaagtctctggtggtcactgcctcttgtttgttcctttgatttcctttgacgaaaaacaattcttgtcttggtgaggtctattaaatctgttcttttccaaaatggggctggtagtgcatgttggacagaactggaactttccctctggtcattccttgccatcccctgggtgattcggtttcccattttctgggatgtgctgatagggcttgtctcccgccccctcttatataaggaggcagggtgcatctagtgccagattttattcaaccctgtaacaatcccccctttatgacatcactgctcatcaccatggaaacatttcctccgagtcacagagactggattgtggcatcatagcatcaggcaggaggaggagaagaggaaaggggagaggattgaaactgcctggagggatgaaatgccaataaaataggacgcagtcacagaaataggatttttctgtccggatccttgaatggagaatctaaccatgagccacaggaataaaccttatctagcataaggaggaagagcttttgtggaatgtagacctgggaccttttgttcctgtgcagtatttcttcagggaaatggaataattttaatgagagctatgctgtattttgttttattttagagacagggtcttgctctgttgcccagactggagtgcagtgatgtgatcatagctcactgtaacctcaaactcctggggtcaagtgatcctcctgcctcagtttcccaagtagctgggactataggtgcatgcctccatacccaactatttttttttattttttatagagatggggtctcactgtgtttctcaggctggtctatcctgtattttatatgcatttcttatttcatcctcacaaagtctctttggactattggatcagagaggttaaataacctgcctaaggtaacacggctagaaaatggcagagctgaaaattattaggggcataagatgtaaactgtgttctcatgcagcttagtgttgggagagagagagagagaggagagagaagagagagaatatgttggagacaattatcaagttaataacatatacatagttaaaattgtggtaggtgtcatgaagagaacagacatgatgctttcagtgaggagatactggagtgtgcataggaactacttatgtttgtatgttattaaatttgggacaaggctctgaacctagttggtatggacttagacgtgcaaggcactgtgctcacatatgtactgactttcccgagctcacgtgctgggccccacaaccaatacccttctcctcagctgcttttctctgcctatgccccatctttttgcttctccatttgtcttctcccttctcctgagatcttcctgcctgccctcctctcttgatcctgtttcttcctactgatctctgatcttctctttctctagactataaactcctcaagagagagaaaactgttcccctgttttatatcttggtttacccaaggatcaggctctagcctgatctaggactgcttctatggtctgctacagaaataaatgagcaatgtccctttttaaagaaaaaaaatgactacatttttcacagttaaaaaatattgtctagtagacttttcttaacaaacgctggctgataaatgaatgaacaagtaacaagtgagcattaaaagggaacaaaaccccagagtaaatggccaatcctgtgttgttctacagcttgtttgtcgttgtttgcataggttcattatgattgtgatttcaagttgtattcatgtgatctggccaccttttctcttaatacaactggtccaagtctgtaggatggtgtcagcttagtgcttcacagggttctaagagctgggggtgctttgccatggacctcctctgggagctgctgtgctggtgccccatgtggcaatagatggatgtaaggaggcctcatactttccatttgtgtcaccttgctgagctttccttgattcatctgagtttcaggagtgtttgccacttgagttcaaggcgccttcgtggcactcctaggatttaaagtgggcaggttggtctcaatttggtctccagtgtctgggctgcccaactcagatgagcaccttgctggttggaggtctgcaattagactttattgcaacagctgtgtgtgtgtgtgtgcgcgcatgtgtgtgcacgcgcaatagtaaaccatattaagtgcctttactatccaaccttgttctttccagggcctacagtaacttgatctgacttctaagggggcccttctggacctgctttatggattctatcagaaccatttatgacgggcacatgtagaactactaagtgcctttttttcctctttttctttgttaagtgttacatggggagtgaatagtgaattaattaagaccacagggtttggagtgagagagacaagagtttgatcctggtttagcctcttactagctatatggtcttgggcaagttacctgtattccctacatttaaatgtcttcatatacaaaataggcatgaatatatatttgtacctacttcataatgttgatattcagattcagtgagatacacttgtattgtcttaccatgatgtctgtctcatcaaaattaactgtgattaagtgggtcaaatgtaccatttgcatattttcccccaaaattatgcaaatactttttgaactcagaataaaacttgaactatagcacagatcatatctagactttttcaagtttgaattagaagggtcagaataattggcattttaattgttcaccatttacaggcaccataggtgaagggagtctaggaagaataactcttagttggaactaattcccgagagccttatcagatattagagatattttccccaagtgcgattctgacattaggactgttaaagcaaattaaacaggtgcagtcccctccctctgagagcaaagagttatcttccagcggggaagttagttcagctggacatgtgtctgtgttgatatgcacatacacttcagcagagagaagtgttaagaacaagcactgccactcaaaagtggctctgtgactttaggaagtcagttcatctttctgggcctccaaatcttcagtatagaaggggaaagggtagtagctactatatgctttttcccttcagcatgtttattgatgtataatatacatgtactagagtgcacagatttaaaacatttattatttttattgtggcaaaatacacataacataaaagtttaccatcttaaccattttaaagtgtatagttcagtagcattaagtacattcataatgttgtaccagcgtcaccgccattcatctctagaacgcttttcatcttgcaaaacaaactccatacccatcaaataattactccccattctaccctacttccagccctgacaaccatcattctactttgtgtctctatgatgttgattactctagctaccttaataaatggaatcatatagcatttgcctttggaatatttcacttagcatgatgccctcaaggttcatccatgttgtaatatgcgtcagaatgtcctccctttttaaagctgaataatattccattgtatgtatttaccatgttttgtttatccattcgtctgttgatgaacacttgggttgctttcatatttcagctattgggaataatgttgctatgaacatgggtatatggtataccagtatctctttgagatcctgctttcacttcttttggggaaatgcccataagtggaattgctatattatattgtagttctacgtttagttttttgaggaaccatcacactgttttcaatagtagctgtaccaatagaacagaagtcttccaatttctccacgtcctcaccaacactttctgtttttttttttatagtagtcatctgaatggaagaagtagtagctcattgtagtttttatttttatttctctaatgattagtgatattgaacatcttttcatgtgcttattagtcatttgtatatctcctttggagaaatgtctattcaagtcctttgcccatttttgaaattgagttgcttgttttgttgttgagttttgggagttctctatatattctgcataccaaccccttatcagatgtatgatttgcaaatattttcttccgttctgcaggttgcctttttactctgctgatggcatcttttgatatataaatttttttaattttcacaaactccaatttttctcttttgttggctatgcctttggtgttgtatctaagaaatccaatgtagtgaaacttttcccataaattttcttctaagagcattatggttttaggtcttacatttaggtcttttattcattttgagttaatttttatatacggtgtgaggtatttaattgttttctatcaagttttctcagcaccgtttattgaaaagactgtcctttccccattgaattgtctttgcacctttctcaaaaatcatttgaccatttatatgaaggtttatttctgggctctattctattggtttatgtatctgtctttttgctagtgccacactgttttgattactgtagctttgtagtaagattttattcaggaagtataagtcttctagatttgttttgctttttcaggaccgttttagctattcaggctcccttgagattccatatgaattttaggatgggcctttctatttctgcaaaaaacatcattgggattttgatagagattgcattggatctgtagattgctttggatagtattgacattttgacaatattaagtctctcgttcatgaacatggggtttgtccatttatgtctttaatttctttcagcagtattttataattttcattgacaactcttttctgtcctttgataattcctaagtattttattatttttactgctattataaatgaaattgttttcataattttcttttccaattgttccttgttaatgtaacgatatgcaattgattattgtctgtatcctgctactttgctgaatttattagttccaatctttttttaaactttaagtgttctacatactacatcatatcgtctgtaaacagagataattttacttctttctttccaattcgtatgccttttttttttcttgccgaattgctctggttagaactttcagtactgtgttgaacagtattagtaaaagccagcttccttgacttgttcctgatcctagaggaaaagttttcagtcttttatgattgagtatgatgttaactgtgtgtttttttttatatggctcctattatgttaaggtagtttcattcttttcctttttttttttttttttttttttttttgcgacagagtcttgttctgttgcccaggctggagtacagtggcacaatctcagctcattgcaacctctgccttccaggttcaagcaatcctattacctcagtctcccaagtatctgggactacaggtttgtgccaccatgcttggctaacttaaatatttttttttttcttttgtagagatgaggtcttactatattgcccaggatcttgaactcctgggctcattttttctgcctcaggctctcaaagtgctgggatcacaggtgtgagccaccatgcctggctggggtagtttccttctattcctagtttgttgagtgtttttatcatgaaagggttggtggattttgtcaaatgctttttctgcatcaactaaggtgatcgtgtgtttttttccgtttcattctgttaatgtggtatactggtcaattttcataagttgaaccatccttgttttccaggaataaataccacttgtcatggcgtataatcctgctaagatgctgccacatttggtttactagtattttgttgaggatttttccagctgtgtcaataagggatactggtctatacttttcttttcttatagtgtctttgactggctttggtatcagggtaattaatgctggcttcatagaatgagttaaagagcttcccctcctcttcagttttttggaaaagtttaagaaggattggtgatagttctttaaatatttggtagaattcactggtgaaaccatcaggtccagggtttttattttttggaagattttcggctacttaatttccttactgttataggtctattctgattatctacttcttcatcatttagtgttggtaggttttgtgtttctaggaatttgtccattttatctaagttttccaatttgttggcatacaattgttcatagtactcatttatagtcctttttgtttctgtagaatcaatagtaatgtttccagtttcattttttattttagtgatttgagtcttctctctttttttcttagtctagtgaggtaaatatttgtcaatctcattgatcttttcaaataaccaacttttggtttcgttgattttctctagtgtttttctgttctctgatcgctgttctgacctttatttttcctgtctgctagctttgggtttagttttcttctttttctagattcttaagttaggttattgatttgagatctttcctgttttttaattgtaagtgtttatagctctaaatttcccccttaggactgcttttgctgcatcccataagatttgatattttgtgtttttgttttcattcatctctaagtattttctaatttctgttttgatgttttctttgctgcattgtttgtttaagagtgtgttgtttaattttcattgctgctgaatagaatgttctgtatatgtttatatctaagtggattattgtattaattctttcatttccttatatttggtctagttgttttatccattttttgagggtaaggtattaaaatcttcaactgttattatgaagctatttctcccttcaattttgtaatgcttttacttgatatattttcatggtctgtcattaagtattcataactgttgcattttcctgctgttctgaaccttttattaatgtatattgtccttctttgtctcttgtttgcaactttttttgatttaaagtcgattttgttagatattagtatagtcacctttgttcgcttttggttaatgtttgcatggaatttttttctcatcttttgacttccagtgtgtttgcatgtttggatctaaactgagtctcttatagacagcatataattggatcatgttttaacaatccattcttccaatctctgcttttgattggagaatttattccatttacatttatagttaattactgataaggaggtacttacttctgacatgttgatatttgttttctatatatgccttacagcttttttgccccccatttcctgcattactattttcttttgtgtgtgtttagttgatattttttgtagtaaaaaaatgtaagtttatttcttatttccgtgtgtgtgtgtgtgtgtgtgtgtgtgtattttttgatgttgttgtttgttcatttgtttttgaggcagagtctcactctgttgcccaggctggagtgcagtggtgtgatcatagctcactgcagccttgaattcctggggacaagtgatcctcctgcctcaacctcctaggtgcatgccaccatgcccagctaatttttaaatttttttttggtagagacagggtcttgctatgttgcccaggctgatctcaaattcctgggctcaagcagtcctcctgccttggcctcctatagtgttgagactacaggcatgagccactgcacccagtctccttttgtatatattctatagctattttctttgtggttaccatagggattatatttaacatcttaaagttataacaactaacttaaatttataccagcctaacttcaataacataaaaaactctcctcctttagcagctctatcttcaccccttttggttggtgatgccataattacatctttatacatcatgtgcccaaaaatgtaaattaataattctttgaaatacattagctagctagcatacattttcggtgtccatttcaatgaagtttcaacacctgattacgctgatgttactcaccacccaaacaagatcaagacatagaacaatttatagcaccgcagaaagctcctttatgtttgctgtagaccagaagtctctccccctgggaataatcaatgttctttcttctattaagttttgtctgttcttgaaaatcatataaatggaataagatagcatggtagatggccactatatgcagctctaatgtggttctaacagcctttgccttctaatattcctatccttgtacagactcctcccctggggtgtggactggactcagtaacttgcttgtagtgaatagtatttggcaaaaatgatggggtatcacttctgagattaggttacaaaagactttggctttcattttgattttgtggtctctggctctcctcatttgctctgatgaaaagcctttgtgtttttagctgccttattggcaacaaccaatgaagaattaaggcccttggccctatatccatagtgagtgagggaagcaaatcttccctcagttgagccttgagattacggtagcctggctgacatctttcgtaatgccttgtgaaaaattgtgagctggaagacccaggtaagatgtacctgcattcctgacccacaaaaattgtgagacaataaatatctgttgttttaaactgttcagttttggaataatttgttacacagcaatagatagctaatatgtataatccttgtattctcttttttgttaagggtttttttcaattaacattatgtctgtgagatttaaccctgtggatatatataactttagtttgttctttttatttctccatagtataggaatatatccaaattatctatctattctgtaattcatggacatctgacttgtttccaatttttggctatatgaacattcctgtacattttttggacatctgtactcatttctttggcatatatacccaagggtagactagctgggtcataaagtagattttagtagataccaccaagtaattttccagagtggttgtaccgattctactccctccagcaatggatgagatttctaatcatttcacttccttgccaatgcctaattttttttaacgtttttcattttagtcattctgttgggtatggtgataaatcccattgtggtttttaattcaattactgagatgttgagcatttttcatatgcctaatggccatttggatatattctttagtaaaatgcctgttcaagtattttgtccattttatattgcattgtctatttttaagttagatttgtaagttccttattttctggacttgacttctttgtcagatatatttattgtagatatcttcttacagtctgttcttaattttaatgaaatacaattgagtgtttttttcttttaaggttataaaatctttgtctattccaaggtcagggagatagtctcctatgttttattctagaagttttattgttttaatgttcacatttaggctcgtgattcttccagaatttgttttatgtgttgagtgtctgatgtgacgaagggggccaatttcattttcttttctcatatagaactccagatggcccagcaccatttactggaaagatgtctttgttgcaaatcaggcgtcttacttgtgtgtccatttgtgaactttctatttggttccattgctctattttcctatcctaataccaacatcacactgtgtcaatactgtagctttataatcaatcttattatttggtaatctaagtttgccaatcttatctttttttccttcataattgtcttggctgttttggactgtttgtgttttcataaacattttagaatcacttgccaatttccacaaaaaaatcctgctaggattttagggtaggattatatcagtcagtaagcttggggaagaggaacctttttaaattttccttaatttctctcagcagtgtttcatacttttcagttgaaaggtcttgcacatctttcagtagatttattcccagggatctgatgctttgtgataccttaagtgggaatttaaaatttttcattttctaatttttgttcctagtataatctttaaattggattttcattatgtcatctgtgaacaaaggtgttttgtgtcttcatatcttttatttataccttttatttcattttcttgccttattgaacaggttatgacctacccacagtgttgaatagaagtggtggtagacataattctcttgttcctgagttcaggggaaaaacattcaatatttccctatgaatcatcatgtttgctataggtggttatggatgctttttactaggttatggataaaagcctctttttcaagtctaacttttgttgacatcatctaattgtatggaaaaaaggaaaagctaatatgtagaaggaataatgatgataacatgggtaagaacaagagaagcaagagagaaaatgaggtaaaggagtatgtaaaataggagaataaaagaatttttggggtgcctcctatgttccaggtgctctgagagccaagttaacttgtgataggacatagggctagtgaggactggaggctggaggagaacccagatcttctgagaatcagagcttattctttctactgcactcagaggaagagtaaacaaaggggaagatttgtaaggaagagaacagttactcccaaatcctcctgtaagcctagggcattgtgtcttttttctgtctcttccatctctttttttttctgtttctttctcagtcatgtgatttctaggtcttggccttgatcttgaattttaacttgatttcattctgtctccagtggtcgaatggtagtgtgtgccttctctccacttccatccagatcatatgaggttcttgtgttctgagacatctcttattttaattcagcttttgagatacccattacataatgccagttcaccctggtcactcagatcacaatggctggggcatgagattaatggtcatgtctttggtgtcattgtcagcactctgcaaatcatggttatccagtggtcactgggacacacagaataagcgggttgagcaaggttcaggctgtagtgaaggctgtaactacccctgagaagtccaaccttttgtggtgacagtcacatttatctcctgtggctgtggactccatttcaaccccaatctgggcatgtttgggagagaggctgctcccctgttgcctgagcttttggcagctgggccagctcccctgtcggtttgctttctcttttgcaaagtctatcctgaggctattatttggttttctagccttgtctgaattaggatggttccatttaaagtgaaaacaatataacacaaccttaaaaaaggactgaagaagaaacagaataaagagaggttgaatgcaaatgtgttttgcagtgttttaatgtattcgggatgttcctctaacattagccagcctgtcgcagcctgcccaggaacctggtgcatttgttgtgtggcagaaaacgttgctgaagaagaggctgaggtttgggctgagaagttgcctgaggcctcctgaaccatcatcttcattattgaaacattaaacaccctttggtccccagggcttgctatcagagcagttggctcagaggacgaaatgtggcaggaatgaggccattatctgccattatcctgttgttctgtaagatatccctatatcccacctatatcccaccccagtagccagttgtttctcagtgtgactttctggagaaagtgtggataaatcaagatcatccatcttcattcctggaaacatagggggtgaagagagagagagagagactgactgcatatgcttagcaaagaggaccaatctcattattacatttaaaatatttgtttcctcccttttgcagtgttttaaagtatgaaggatgatgaccagacatttgtttaaagcaggaggcacacccacttcccaggagcttgcattctagtaatgacataatccatgtcaatgttagacacatgtgtgcatggtctggccttcaaacaattaaacaattgtgaggttgccgaagttaaatttcttacctgggcatagacccattgaagcaacaataaagggagtgtactttaagaatacacatggaagacatctttaggctttagtaataaaaagccctatttgatcaaggaggttctcgttatttgggatagactggttgggtgaactagacccagttcacacaagtgacttatagagagttcagagctgagaaagcagctgttaagtgcgttcctatgtgtaagcacgtacacatccctggcacatagtaagtgttctgtcaatattagtgaatatgactattattgatgaaacagaagtaaagattaaaaaccatctgagtctggtaaccaaatccctaggttcagagtttctttcatttaggataaaagacactggccagtgctggaaagtgagttagactggatgtgtccacatgtttgtaaatgttttacctgcctctttgatgattcttcttggcctaacctaatagggcatgtgctcaggacttgctgcccctactgttagcctcctgagggcagggaccacatctgtcccagtatttcctagccagtagagtatgatatgctcaaaatatattgttgcaataattgaatgatattttcaaaatgagtcagcaacatctgtggtatccctcaaagttgatactatggaggtttaaagaaataataggaacatgcccatcacaaagccctgctctgtttcctcccctcccagtgttatgttcagctcttggagcccaagccaaacaagagaatcattcactgagggaaagcaggacagggaaggatactggcaccctattgtaaaataaaccattacaaatataggttcatttactctggaggagagaagactttgggaatgaaagttctaaacatttgaagggcttttatacagaagaaggataagaattgttctctgtggcctcagaggacaaaagttagaatgcggatgagaagttgcaaggaggtagagtttcttgcaccataaagaggaactatgccatggagagaagtggttggcagagtcctgggatctgtttgggtacctgctgagtggttaatgtgtgtgcaagattttggaatctaccttcagaatttcttataaagtagaaattaaataagatgagaactggggtctctttcttgtggggagggaagtaaaagctgttgtagtggcccaggtagaccacttagggctgctgagaacgttgtctaccttgaaagagaaatgaagggacccaccagttactatgaatcaggaatattaccagatgctttctttacatagagttacttgtctcataacactgggaggttagtattgaaggaaacatactcacagaggtagagtaaccagtccagggctcacttttcctgtcttaatcctctcctggaatactgtgttgtcaactggatcccctttacaccaaatctactttttcttcatcgaaataaatgactcttgggtagaatatccctgcctcaaactgttctggaactttcttcagggacttggatggccttctaagtactggattttgccttgtcagtcaagaccttcttctctttcctgcagagtccttgccgagggctcttgattgcaacattccatttctttccttctgccttggtggagggtttcagagagccttctgttgaccttcttttaattgctaataattattcaattttatatagcccacagtgataaatattcatgaaaagcacagtgtatcaagatccaacactttaagctattgtgtttttttaattaaactgaaacatgggattaaatgcaataaaacgaaaaaaagagagagcatatattgttatctatttcagtcctgctgtgagactgcatgggaggccgataggaaaccttgacctgggtgctgcagtgttctgtcctaaagtatgtaaaggagacctctaaaacatctggaccggctggattcattcattcattcacacatttattcattaattcactcagcacacatttactgattgctaccatgagccttcctagtgcctctcagagggatacaaatagactagaacagggaccccaaggagctcactgttgagtcctagatgaggcagctgcatgaatcagccatgccagagttgcatagtaaatacaagcaagcacataaaacagcattcacacgggggcagtgagcagctgcctggggtggtagatgtggtgttgtagaggtggtggtccccatcaggacttaatactttattagtcctgccttcagtgcatcttttctcaacctagtgagtctcatctctaggcgtgtgccagaagcaggccaccgaccttctcctctttccctggagaggctgtcccccgtgtggactctgaagtcaggctgcatgggttcaaatcccagcgctgccacttcccaactgcataaccgtgggtgagtcatttgacctccccatgccttagtttccttatctgtaaaatggggataattcatagaacctactgtataggattgttgtgagggctaaactagtaactgcacgtgaggggcacagaccagtgtctggcacactcgaagtgccaaaatgctgacacgcgttattattatttgtgccgaggccttggcccatgacttccaggttctctggagggctcttgtgaggttttgctctgtaggaagcaggcaagctgcaggtgcgcccttgtggagagttctgaatcgctcctgagagcttctctcaagcaccagcaagaaggaggcaacgaaaagccttagcaaatacctcccagaccaccagccttcagaaggagcaggaggccaggcaggccctgcggggaacagagagcaggagggacaggcgccagggcagagagcaaactccctaggaccccaccttccgcagagctccgcctcggttcccctctctcccgggaagaggaccagcttgcgcatgcgcttgggcgtaacacatgccggtctccctgctttcccactttaaaacgggaaatgtacgttatttatttgcagcgcaggcatggggagacgctcatgaatcagcatggggattttctccaagtaaacaaacccactttctggagaggcggttgctttttccagcctgagagatgagagagagctggagagcgcagcagtgccgcaggcttcctggcaccctggagtcctttcccgggccgactccgtcatcctcccccgcccgcccctgcctgcagtgtgggggctgctgagcgaacccaggccccagccctcccacggaacaccaccaggctcgtctttttgcgtcaattcacccaatagctgtttgaagtccaagatgggcttccaggggctgtgggctgaggaagaggctctggggcaaggcttggtgggatgaacagttcaggttgattttgcttaggggccttggtttgcactctagccctgtgtggcttttagggaatcaccagccctctctgagcctaggttctttctccatcactaggggattgatcagagttgaagccagagtctttcccatggccagttgcaccctcacctcattcctgtctgctcctctagcttcctgggtccatctacactagcctctctgttctccaataccccagtaaagctcctgccccagggcctttgcatggacggctccctttctcggaatgctctgtcccctgatagctgcatggttcattctctcctcttctggtttttacttaaatgtgtcttctcagtcctgtcctggccacccagtctaatactatgttcccctccacatatttctcttttttttcctgccttagttttcctcctgtaaatgtcctgcatattgtatattttaatgatttatctattgattgcctgtcctctggtgggaatgcagtctccatgaagacagattttgtctgttttgtttccaggctgccatgtgatactgtgaaggggctggtggggggagtattatagaggtggggaaacttagcaaggcaaggtggtagaaacattttgtgattgtgtgctttctggttctcttttatttccagagctgtgaaatttagtggcctctccagaaagcagtttgtttacttggaaaaaatcttcatgctagttcatgagcatctcacctggcacacctggcccaaagtaggtgtctaatagttggtgaatgaatgaatatgaggccaggtcctggggctgcatggcctggactcttgcacgtatcacctttgtgaagctgggccagtttcttagcctctctggctttggctccctttcctgtaaaaaggggttaatgatgtaactaccttgtaaggttgttggaggactctgtgtgaatctgaataaggcctgaaccttataagtcctcagcaggttagcttttatttttaaaagtactttcagctctaacattctaattccaggcagaggggtgcctcctatggaacttgggtcaagtccttaaggaataacttatgtaggcaataggatggttaatgcatcctgcctcccaggctgctctggaagaggttgggggctgctggtcaaattgcaggagatgcagctttctccagcatatttattttgctaaaatcattgaagaaacacagctaggcagaaaagtattccaaaatgacacctgcgttaggaaacttggaggctgtgggtctggtaccaggaggaaggttgggatggaggggtctggccctggctcctgaagcaaaccatgaactgctcttgagggcagatgcagcagcccctgaagctctctgctttctgctcctgagtcttgctcaggcctggtccaggattttatctagttgttcagctcttccctggcatcatggccattgtgggggccattggcttttagccagtactctgggatctctacctacccttgacatctaagcatgctttggctcagggcctcacagaccacagaagcaggccctaaatgtcctaggagtagggacacttgtcctcaacctggtgcatccccagccaactttacagtggaccattcaagtcaaggtaacattggacctgggtcatgaagagtccagggaacaaaagaagactttgagaaggagaaagcctttttaaatttggggcacagtactcaaataggaagtttgagtacaagtctgtgtttgcctcttggtcttagagacaggatacacttctcagggctaaagtgcccaagactccacgtactttggattcagatagagcagatgctttgaaatgaatcctcactgcccacttctgttcctcataattgttctttatggggaagataaaagaagtggccagctaagacctatctggtgagtcagtatatcttccaggatgatttttgccctcagcatgaagccttgagtaagagaggagtgaccaggagagaaaggtatttttacccttttgccttgatgctatcatgatggctcattgtatagatgctgtgggtaatttttagtgccaggtggtatttgtcacctgatttttgtcccagccaaacagcagcttggagaggggaagctaggtatgggagggattggccttaggacttagaagtgacaggctcgccagttggctccctggcagcaccagtggctggcaaggtctggaatgggtccctccacatctatgaaaagtcttattgtccagccaaacaaacaatttgcttattcctgctgcatgtgtttggtaagcatcttctatatgctgggctcagggctctatgctggggatacaagatagtaagaccaaggccctctcattgagttataaccatctcagaggagagccttagaaagcctgcaaagctctctaataggggtctatagaaagctctatagtaacagagaatgttgtctacatttacatgctatcacctccaccaggagagttcacagaagtgacacagttactgtatcttgaagtttccaggaatcaaggtggtaattctgctgtggctcagggatggctctggcacgaggcacccctggtcttgacactctccagggatgtgaccctggactggtaaagggctgtgagtctcagcttcctcagctgtaacccaggaagcatggtaccaccttatagggtggctgcgaggattaaaggaggtgccattcataaagcatgcctggcatgtggcagggaatggagctgttatcattctgtaagcactatggtgctttgcttcatttcttattcctatctttaattggtgatttggttgcattctctggaatagtgacatacagaataggggaagcccattcattcattcagttaattcctccaatttttcaacattttttgagcacccactgtgtgcccggcacgggagccacccctgggacacagatgtaggtaaggctgactccttgcccttgaacattggcaggggctgcggtgtgtttgtggctcctcagtggaccctgctgctgctcagccctcttccaccactggccactcgtgggatctgtgggcagttttttttcactgcttctgttcttcagatatctcaactgaagaatgaggataatgataatatcaattttatgatatagttgaggggaataaatgagctactaaatataaagaacataatgtcaggtattggttggaaagtcctcagtgttttttttttttttttttttttttttttttttttttttttttttttttttttttatgagacacagtctcactctgtcacccaggctggagtacagtggcatgatctcagctcactgcaacctctgcctcccgggtttcagcaattctcctgcctcagcctcctgagtagctggaactacaggtgactatcaccacacctggctaatttttgtatttttagtagagacagggttttgtcatattggcaaggctggtctcgagctcctggcctcaagtgatccacctgccttggcctccaaaagtgctgggattataggtgtgtaccaccaagcctggcctgaaagtactcaatagatattgatgttgatgaatagctggaatatagacaaataaatagatagcagacatgcaatgcaaaaagccctgaaagaagactgaactaagcattgtaggagcacagaggaagcacagactctgcctacaaggcaaagagaaaggatgctgctctgtgtccaagaatgagctcactggtcaccctgggttgcttctaacacccaggctgctactccctggttccactggaatcctacagtgggcaggagcttctgggaccatctaccagtgttcttctggagtgagatcatggggccatgaacctgggatcagctctccctgcccacccaggaggaagaggcagcagctgcaaaggttgcctgcatgaggtgctctagcatatcctgacctaggtcacatccctcctgtctgtttgaacagtttctaaacccctcagccaagcagtgcctctcccagtttattgaattgcattagttttctagcctaagccctggcccaccttccccatctttaagcccttaaaaaaacttacatatgcttggaaataaggccccgttctgtatagtgatttccagtaggagcaacgattagtgttttgggaaggtagaacattctttgtggtgcaggactatcatgtgcattgtaggacttagcagccctagttctaccctttaaatgtcattggttccctcttccctttgtccccacaaatgttttctagggagtggaacatcccctagtgagacccagtagaactgagataggataagtttttgcttctattctgggcttctttgctgacattccttcgactttgggattgcccggctccctcttgcctgacccttttgtctgtgccttactggcagtgagatcctgcagccctggggtgggagagagggagctcctgggaggaatggtgtggtgggggaagtggatgaagtggaatgaaagtaggtagcacaggcatctctttagggacatctactctaatttctctcgcaggccaccatcactatctctgcggtgggagaaggtcaggttggagggtatggcctgttctttggaagtgaggctctgagcaggggcctggctttccttgaggcaaccaggggctctgtgggtatgttctctggtcttggttttgggagggtggtaatttttgttgggggagtgggacaacaggagcagtggtgaccagctggggcatgggggcaggagcacagggaatggtggaagggagtcaccaactgctgcaggcttagactggagtgacttcagcttcctgactcacccctgcaccagcctcctggataaataaagtaacaaccaatcgtcgtgagctctggacacccacagttggtaaattgcagagatgaaaagccaggtccctgtgagaccagttctactctgaggtaatagccaggaagactcaggaaccctgggggagagccatttggattcagaaggccacacaagtcttctctctcccccattttttcctcctttgttctttctccttatgcattcctatctgtccagtacccatccttccctcttccctccttgtcatcaaaacctctcactgcacatgatggaaaagatccaggatcctgggaggagccctgtgtagttggtggtccctcttagaaccacaaacccaccccgtctcaggatcctcatacatctgtttgtccatgtatccattcattcatccacctacccatccatgcatccatctgtcagtccacccatgcatccatgcatccgtctttccatctgtcaatccatctatccatccatccatccatctatgtatccatgcattcatctttccattcatctatccatccatccatgtacccatccttccatctatctattcatccatccatgcatccatgcatgaattcatccatccatgtatgcatccatccagtcatccatccatgcatccatgcattcatctttccatccatttatccacccatccatacatccatgcattcatccatgcatccatccattccagccctgccttacatcccctgtccaccaaggtggccttgtctttccaactggacagtaagctccttagatgagggctcatgactcagacttttaaaaaatcatccaaccaatctggcttggagaatggggtgctgcctaatatactttgatgctttctgagctccttacctcttgcagctgcctccatgtagaaggcaactggatgaatggaaaaaccctttcctgataccaaataccagtggctgagcttcctttaatgatgagcaacatctttattctctaaaatgagacaaccccacattcaaatgcctaggagaggccaccccaaacataaatacacactaaggtgtaaatgatctatgtgaatttcttccctgagtgtgtttgtgcactgggggtaggggtaggggataggagacagcctgaagtgtgagtgggtaccatgcaggagcagggcagaagagaagaagcccccaggtttcaagctgaagggcaataatttgagcatgagaactctgttggactggtatgtctggatccactgcctgtcaagagggtggtggggagcggagggctggaaggcacaggctctggagtctgactctggtagttccagtctcagtccctgcttcctagctgtgtgccctaagttctaagcctcaacttcttcatctgtaaaggggggacaataatagtactgaaaacatatggttttcatgaggatttgctgaaataaagcctgtgctttgctttcacagtgcctggcacataacagcccaagaatttagtgatcatcatcatccacatctctagctttgggaaaaggatttggagcaaaaagaagagggattttcatactttgaccataaatcatagcattgtcagatttagtaaatgaaaatacaaatacatttatgtgttgtttatctgaaattcaaatttaactgggtctcctgtacttagtatggcaaccctattgagtctcccagaagcgggtctggattgcctcctccgtcttggtcccaaactagaacagttgcagggtcagggaggtctccagtgaagcagggttgtgggggcaaggaagccctgcaccctgactggccactcatccagcagcctggaggctgaaagctctgaaggagggacgattcgggtgaagggagctgcccaggcagaggctgcgtgtgtgggggggcagttggagggggggacccagccgtggtgcagaagctttgagcttagtggatgcagagggcgttgtgaatcagagcacgttgactccagcgcctgccagccagcgtgggcagagagtagcagcgtgtgtggatacgtgcaggagtgcagcggtggggaccgcttctgttttcttcttgaaagaagcagcctgcggagctctgagcgttctcacccctaatgggtggattgttcggcctcaactccagttttctccctttcttgttctttttctctactctctttcctcttttcttcctcccctatcattttcttctcttcttttcaccctctctctcagattccctccacaccagccattcaggaagtacctctgtgggtgggattctgacgcatccttagttacctgctgttccatacccacagactctattccctccacgtgccaactcccaggaacctgcccaacgtggccagttattggcagcaagtccttgagtcctcactgacaaggagatgcccagggcaggttctgtgtgacccatgggagatgagccctggccccttcagatgggcatgcatgccaaggaagtgagaatgtgccacccagaagtgcctgaggtagagtatagctcagagtggcctcttactcagttaacaccctgctgctccacctacttagggcactcacactttggctcctgttcttgcctcggcatatgaggccctgcatgacttgccctctttaggcattcttgcttcattttccatcactcctgtcctcccacctggagctccaggtaaataaaactgcttgtagttccaagaaagctctgtgcccttcacacctccaggactgtgtaccttctgtgtctctcctgactcagcaagatccagtcatccttcagtgttcagctcagatacctcttcctccaggaagccctcctgacagccactggccaacttggccttcaggactcttactcttaagttctgcttacgttgcccatgttgccatccacattccacaatgtgtggacttgtggttgtttgtttgcgtgtctgtctcttcatgtagactggaagttccatgaattatatcttttaatcattcatgcctcagggcctttgcacaagctgttggttctacttgggacactttcatcttctcactgttcatgagatctcagcttaaatgtcaccttttcagagtagccctccctgactccccttacactggaaaactactttatttatattagcacctgttttatctctcagtggtttattacaacttgaccttttttttcattttgtcagtcttcaccactggatgataacatcttgcagggcaggtggcttatcagctgcttcaccatcatatacccaacacctggcccagtgccatttgctgatgggctggacagtgaggcatggagaacagaaacaccgaaggcctagagaaaaggaattccagctcgggattttctgaatttgcagactgatttctctgtaaaccgtaccatcccatcttgtctgtggctaactggttaattccagagcaggtacttccattgtgtagcatcatcagcctctcttttggcatgctttaatcttaatgtatgtttatatttgaaattcttcagtttggttgctgtccaaccaacaggaggggtcattttctggaagcatgagggatgtttaagggagagtggctgcagtgcctgggtcggctctgggtctggctcactgaggaattgaagtttcctttatcccttgcctgtagctgggaagctgggagactcccttatgcatagatctggcctgcatggcagtacctgcaaaggcataattcttggggttgaagcacttctctggaccctgggactcctcaaggtgggggtgtgggatgtggatttgacgggtcagtcctcagtaacccatattctgctgccgtgctcctctcaggagtgatgactcagaagtccccatctctggagtctcccactgagcggtgaagaatgtcagtttggaaacagcctggagagatgatcttctcagagtcccatactttacagatgaggagaccaaggctcatggagaagaaatgctttgcccaaagtcacagggttgaggcaagactggaacccaggtttcctaccacttcacctggagtgcttcaccctcaggcataggcagaccttcatgtaatccagaatgtagattcagaggtgtgggcttttgtgttgcaggaacctttatatttatattcactgtacaaacagaagccctctttttcacttcctacttttccctccttgttcatcatcatgagaacattgagttgatgaggacgaggtcttgggtttcaggatagtggacaacaggcattctcctatggatccgtgatccaaagaaggtctgctgacccctgactgtgcatcgagggaccaggcaagaccctgatagcaataactcaatgcttcctttatggaagagagcccccatgtgtgttcagagcactttgtgtttggatacagattttacaaagctgtttctatgtgtttgaccttttgaagggtccactggaaaactcttctgcagcttggcttagttcaggtgtgtgattacagctggctcaggctcagaccattgcatactttaggacagtgtccagggggatgggctttgccagcacccgtgggcagcttgtcctgcagtgctgttgccctcctgacatgcaataaaagatggggaaggaaggattccatggtaacaaggctgaagagctctagcaccatggtgtcatagcaaccaaatggaggaattccatccacatggtgacaaggagacccctggacctatcagactcagaccagtccactgcattagcaaccaggctgggcaccctatgatgggggtgagggtgggaggaaaatgaaaaagactacagtgggaggattggaagaagttgtttgtgtgggtttagaaaactaaaaaacaaaattattaaaagagacagacatagagaagtctttgctggattagcaccaactaaagagaaaaaaaatcaggccaagctttaaatcacctcttctgggaagtgtttccggattcattcgcccaatgtgggccatttagttttcatcttccctgtcttgtctggaccatttgaccctggctctggggacgacattcacttccagttctcctcctttgtttttctctgttccttttgctaactcaagacatggagcagatgctaaaataataattggctgccctgtccctcccttaccatcttattatgtggcatgtaattgtttatatgtccattttggttaattaaatgaactatataatgtgtgtttgatttccttttttctttttgttttttgaggcagggtcttgctctgccacccaggctggagtgcagtggtgtgatcatagctcaccataacttcaaactcctgggctcaagtgatcctcccacctcagcctcctaagtagctaggactataggtgtggaccaccacacctggctaattttttgttattgttgaggtgagatcttgctatgttgtccaagcttgatttccttttatactttaccttccaccccagacaagggtctgtttttttttaccctgcaatgtggacacatacaggtattcatgagctgatcaggacttgatttggggttaggtaactgtctataggctcttgtggctggtgtctgtcagcaacctggcagcctttctgagatgggatcatctcaacaaggatctggggaagggattgagcctttttcctccttccttctcagttggggaaggggagtggggatgcagagtgtgggaggccttggggagaaataacagagggaagaatggatgagggagatctgtgcctgcagcagcagaggaaagaaactgactgtcagccttctcgtcatgtgtctgtgccacagtgcctcagtggtcaagggcagctttagatgcagaatgtctctgaggctttggggcacaagatggactgagttttctgtatgtacacaatcagttcctacaaagttggaccatggcttatattactttcaatggcaaaaactgcaattactcttgcaccaacctaatacttctctgttctccatggtgcctgcactgggatgggcatacagtgggtgctccatatttgttgaatgagtcatcattcttgtctttgtccagcttacactctaactgggaaaatgaaacatttctccaaggatcaccaaacttcagagacattaatagactacacattttcaagtgttaaataagaatttgttgaccattgagtaaatatttggcagtagggcttggggttggggaagttcagaaacaattcatggtagccaagtctggtggtctaggctataaagaaaaagcatgtctctcttctctaagcagggctgtcattgcaacccagtgagaaaactctgtatctctgggggcctcaaacttcagttgaatcagaatcatctggaaatctgtttaaatctgcagctgctgagggctggcccaaagatctgattcagcagtcctgggaatctgcatttttaacaagctacccatttacttttgatgggagtccgttggggactatacacttagaaacactagtctaccccaggggcattcctcatacagtgaagcctctttgagccacataagcttcagggattgcaattcttaggggattcacaaatagttttaatagcagtaaggtagcctctgtggggctggcagatccaggaaccttgctttccccagcagaggagaaagcatcaatctagtcttttgttatccttcacttgtgcagccaggagacagattggctgagctccagtgtatggaatggaaagtgaggatgccctcacggatgtgtgaggtttacacacaggtgatgagggtgagctggcatttcagcaagccacaccatgggagctgtgaaatgcaccagaggatagagagtatccgagagatgacttgccatgttaggggatgtctttaaagacagaaaagcaaaactatttataagccaacatactttgcagagaattcagaaaaacccaaccaatatactgcactttctttcattctgacttttcctgctgcattttggctcttgggtgggtgttgaggattatgaccgcaaccttgacagtaataacccagagctgactccatacggacacagtgctaagccctgaatactccttgtctcatctaatcttcgcaatgaccctgtgatgtctgtgtaccaccactctccatttaacaattgaggaaactgaggcttcaggaataacaggtccagggatctatagctggtaattgatggatccaagatttgctgtcagtccctaggttggaaacattatccaaggaggagattcttttatttacctttcttctctctctcttgttctcttcccccatgtgccaaaatgtgcattcctctcccatccaatttatcctatatagcttctatttttggtaatttattataggacatggggagtggaaatgtaatagaaaatagatttttttaaagcatccatttgaaaccaaacctctcttcagcaagacacacaggatgagtacaggtttctacgcaggacacttgatagctgaaatcattacagaaaaacagagccttgatttgcgtggttgttagcaaagcccctctcctgtgattgtgacagatgtcttctgcttgatagattgctttccacgttagattcaaggattcttttctccccttcttcttggtgggcagagggacatgcttaccaacataaaattcagcccaagttttaaaggtgagatgcagagccagaaactgcccttctctgagacaggcccctgagtgagctgttgttggtttggggaagtgacagggtattagggaaggagctttggaagcagatggttcaaatcctacctctccagctcaccttggaccagttactttatttctctcagttgctgtgtcctgattcctagaacatggatattagggttttgaaggtagtggatgctgaggtacatccccaggatcccttcctcaggacaagccttcattccccagctgctttaagtattggcagctaagcttctccctaggaactgcactcagatataaaggattgcatagctcaaagttatcccactccctgggggcagcctgtgtccatgtcaagggtgaaaaggcctggccatcttgtctcaaggaaggatggatgcagagctccccataggtgggcatgtgcctctgttatggctgcagtatagcttaactcctgcctagccttcattcccacacaggagtttgtccttcagatactcccacactaatttacctcctacatgcacatttctgtctcagagtcctgcatatgcaactgaagacacctcacttacagggttttgtgatgattatatgagattattgatataagtgcctactctaggtcttggaaaacagtaggtcctctgaaaatgtaggttgtattttattagttttaaaatttcctagaaactcttagaccaaacagcttttctgtattttggaaaagtattgagtatgcagtcatgatcagggctcgataaatttcagcgaaaataggaatcctttggagctatgaaggaagccctcgtgtcgattcatgtcaaacttcattatcagaagtggtttgggacagtcagatcagctttgtgtaatggaattttattgtggtgatttttttctattttacaagaaatcatatactctctgaaggagaatcttcccagagatattttcacttataggaagagattaagcaaactaaatcttttagtgaggaattaatggggagaagaagtgttgtaaatccagtagctgggaggggtgtgtgtgtgtccctaaggatgtattggtggtttgttatttgctggggggttaggaaacttagtcgatggttaccagtgggaatggtcaggatattggaggctctgtggagggaagaggatctagtataccatttaaaaagaacatttcttgtaggtggttataaaagaagtagaaaagaaatgggaagaaatgcacatattactgaaatggataagttaaaaaaatgaaagaccattctttatccctgcctcccaacatgagttccattcctcagaggtaaccaccctcacaagtttagtccttatctccctcagctttcctctctacatgtgtgatcatatgcatgcaaatttgtaatatgggtatgtacatattatctttttgaaaataaatgggttccatcatgcattctactgtgtaatttgcttttttttccactcactgtattggatatttttctagatccgtatatatagatcgacttcatcctttttaatatttgtgcataatactccattaaatagctgcactaaaatttatttaaaatgaccaccattgcattaattcacaatagtcaaaatattgaaacagcttaagtgtccaatggtggctgaatggataaagaaattgtgatgtatatatataatatatatattatatacacatataatatatataatatgtattatatacacacatataatatatataatatatatcatatacacatataatatataatatatatcatatacacatattatatataatatatatcatatacacatatataatatatcatatacacatattatatataatatatatcatatacacatattatatataatatatatacacatataatatataatatatatcatatacacatataatatataatatatatcatatacacatatataatatatatcatatacacatatgatatatgatatatatcatatacacatatgatatatgatatatatcatatacacatatgatatatgatatatatcatatacacatatgatatatgatatatatcatatatatatcatatatagtatataatatatattatataatatataatatataatatagaatatatataatatataatatagaatatataatatatagaatatagaatatataatatatagaatatagaatatataatatataatatatataatatataatatataatatagaatatatattatatacatatataatatagaatatataatatacgtatataatatataatatatattatatacgtatatattatatataatatatattatatacgtatatattatatataatatatattatatacgtatatataatatataacatatataatatataatatatattatatacgtatatataatatataacatatataatatataatatatattatatacgtatatataatatatataatatatatatataatggaatattattcagccataaaatggaaggaaatcctgctatttgtgacaacatggataacctggaggacattatgccaagtgaaataagccggacacagaaagacaaatactgcataatctcacttacatgtggaatctaaaaaagttgaactcatagaagcagggagtaccagggactggcgggtggaggatatggcgatacgttgtacaatggatacaaaatttcagttataagctgaaccagttctggggatctaatgtccagcatgggtggtgatggatgtattaatttgattttggtaatcatcacattgaacaccttgaaaatattcaatttttgtttgacaagtattttaaaataaatagatgaataaataaataaacgatccctgatagatatccatgttgtttctagctgtttgatgttgtaaacaatgctgcaagtgaatatccttgttcacacatccgtgataccatttaaacatatgaccgtgacttccatagggttggatgcacagtaggtgtggagtcaataattgttaaattggattgaaggctatgtgcatgcagcttgctgagagaccaaaggggcatagctctgcttagcacaccactagaggctgatttttcaggagagattggctatcatgtagatttggacgaggaaagggtctggtgcactgaagttctcctgggcgagaaattgcttaggtctgatggtgtatttactgggtcttcttgtcattcttcatgtcacagaaaaccttttctttacatcaaagttagcctgtgcactgatgctaggagagttggtgttttcttcctttgtagttttggggcatgggctttgatctgagtgcatttatggatgatcacagggctgtcacccaagcctgttaaaatgttcacaggtgcttctggctttacatgacaagggggcctattcaaagataacagttggccggtgctgagcctccaacatgtaaataagcattgaatgtgatcacttacgaatagttaattttatgttgcatccagaacatgctctataacatagtagttgatccacagacccattaatgcatctaagtgaggggtctggtttaatgaggctattcagcatattcatggtcctgcctctggtttaattctgtcactcaggaatccaagcaagcccagcaccatggatgctgcctgcacctgttgtgctttatcaaagagtgacttttaagttttttgtactatattaccaaatgttcagagaaggaagttttcatgagggccgtgaaataattggaacaactctttctaggaagtcatggaccatgtgagttcattctgtagcattcttattttttcaaagcactctgtcatttcttttgtattgcattcttgtgaagtaaggaaggcaggcattcccagccccattttacagatgtggaatctgagagtctgagtttagtggcttgtacagagtcacatgggccctgagacccaaggcctgagacccaagccctgatttcctgttttgtggtcattgcactcttttttgcaaataacaactcaatggacatgtcaaagtggtgtacacaaagactgagtacacttacatatagcacactgagcacacaatgagtttaatatgtgcaaattcctgagtaagagttgttaggatttagttttgatttgatactcaacagcccctctttactgccacacccgtgtttcaacctgttgctgaccattctctttaacagaggcacacacacacaaatatgcatttaaggatgatcacactgctcccacaaattaaataaaaagttattttggaagaaagacggatgatgtcattcataattagacccattattgaacaaatggctatcctgtgtaactctaggctggacatagagaaggccagaactttgcaaaagaattgtccctaccctgagaggctggcattgtagttggggagatgagaagatgcaattagataacacagggaagtgtgtaatcagttgtccatcatgagctatgaaaacctttatttccctaggattttggggaaagtagggtcactgtgggatggaggagtcaaggaagcagcatgggtccttaaattctcgtaacaaaggatcttaggtgctaggtggaatttggatgaagggaatgggaaaaggaagacgattctatcacactataagctccaaaaatttggggttcagagaggaaacatcagatagctgtaaagagaagggatccatcgtcttctgattatatttgttagtttccagaggaacttacagagtgcccaaatcactgattcctgggacgttttgcaaataaaagtcccaagggtttaggtataaaaggataaaagcctggaccaccaaatgtcttgcagactcaatactttggactttagctgtgggtgtcccagatttcctagttgtcattgctatgtcatcaccatcatcattatccacatgtgacatgtttgcagagctcttgatgggggaggttctgtggtattagaaaacttgtttccctggagtctccttaagaatataaaactgaccctaaatatgaatcagtattttaccaagtaattgccaaacagcaaacaagtatgagctcagagggaagagttaactttgggctaagatatctaggatggtttcaaagatgagatgggacccaactggctcttgacaagtatgtgggctcagcgtgttagatgaatgagtagaagatgaatggcaagaccattgcagatctttgaaaagaccttagaaaactacctttggagatgtgtggaagtaggaatatgatggcatgtttgggaaagagtagaccagcttttttgaagagccgggtccttgtgggatattaggtaaaaggaggagaaaggggctatgatatggggtctttaatgtcagtttgaaatgtctaagaatttagatacaaagtattataaaaccacaaaggtaatcaggaaattctagattgttggaaaatcataggagctaatagattttttaaaatatgaatgattctaaaagatggatgatttgctgttacctgttatggtaactgcatctggatgcaatgtgagctttgttctagtagcaattcattatgagatacttacagattattttctcacctagtcttgaataaaaatgtaataaatacccatccaaggggctgttgacaaattgcaaacataatatgccacagaccagaattaagtcaaagcattgcctaaggttgggcttcagagtcacaagtggttgcttggacgctgagctgtgattttaggagtgggtggtttgccctgagccatcggcattctgcttcctgatcactttgtgtaggaaaataaggtggcctgaggtgtgcattccctgtactggtcaggaagctttgagtgacaagtgaaagaaatgaaactcaaaccttaaccaaatgaaaaacttaactaaaaatccagcatggaagtagcttcagtcatggctggagccagagaggctcagtgtggttatgagtctggctttttctctctctgtttccaatgctgctttcctcattgttagtttcatgttccagcagactccatgtgatgggaaacgtgtgttctggcaatttagagcttgcattgaccaaaggagagtaggtatatattctctttctcttcctttcttcattttatccctgaaattgttgaccccacttggatcatgtgtctaccccacctctggaccaattactggtcagcttgaggaggcagaactctctaattgacagcctcatcagaataaaatggagtcgggagagcagtttccgaaggaagggacatgggccagactaaagtgggggtgggtagggagggagagatcaaagtgataccaactgatgctgactgtcacggggtggggctttatggtcttttggctttaggtgctctccggtccacacagccagcctcatgcctagaataaaaggcaggggctcagccttagcctggagtacaacaaaggatgtgaatatcagagacagggacctattggatctcacagccaaccacagcccaagctttttaagtctgtagaaagtgacttacctctttgaatttttattccgaattccagttaaagttattcatactgatagaagactattattgcttagccttcagaagaagaagaggttgaagttcttcccttagaagttaccagaatttaattcgtggaaagttttccatcttgcatttgctgtacttggactaaggctcttgtaggagataaaatccctggcttttgttcctatttactgtgagttctacctctctggaaaacaatctgggcctggagaaaatatacataagcaatgtttagcatttacctgttagggtcttataaaaatctcatagcaagtgcagttaatacatcctttccaaaccatttgtttggagaaagaggacaaggggtaggagacggatctgattttctccatttggctgatacaggaagtagtacataggagggttaagagattttcaaaggaatattagtggcaaaactgaaagacagaaaattgcactcttaattacaaatcagttttcttaacaatcggtctttgtcttttctgattctagtatgttatttcctttcaaaagggtagcaccttcaacagtcactttcactggagagcccattcaaatccattggtgagcccaacggatcgtagccaagaaatcatttaatgagatctagaccattttacaaggcatgctgggtttccatttattgtagtactgcattcaatgtgtgcatttctctgatttttctttcaaaatagaatgaaaaaactttgttttctgtagctttctcactgattgctaatcctaagtgcagtggtaatgaagggtgtagctgtctggttcaagagttcaggcaagagtagatattattgacaagaggcttctaagcaggtatcaagtattgaataaatttgttttgtgatttttttttcggtattgggtagaaaaattatcctttccagcactctgaacatcagtaatattttatttaattttggctgctattgttgatgctcatgttgttattatgtgagtttgtgtgaggagctggtaaatttcttttgtaaaagggcatattgtaaatattttggttttgtgggccaccgggtgagctactggactctgctattgtgtgaaagcaaccatacacaatgcatacatgaatgggtgggcctgtgttccaataaagctttatttactgaaacagatggagggtcagacttggctcatgggcagtagtgtgcagactgctggtgtatacagtctgttggattctgtctatgcggaccgctgtgtttgagcacaatggaaacacactgtgttttcatatggtttctgcagctgccatccagttcccttccttttcccttcagaactgtgttacaggatacaattaatatcactattactttttgagacctagtctctctttgtcgcccaggctgcagttcagtggcacgatttcagctcactgcaacctctgcctcccaagttaaagtgattctgctgcctcagcctcctgagtagctgggaatacaggtacctgcccaccaccatgcctggcaaatttttatgttttcagtagagatggggtttcaccatgttggccaggctggtcttaaactcctgacctcaagtgatccgcttgccttggccttccaaagtgctggaattacaggcgtgaaccaccgtgcctggcaggatacagtttttaagtgatgtttccaagagctccatttccaatgtttgcattttcatcttaagagctatgaaccttggactgtactcaggggcctgattttagttcttcagaagcaaagactgtaaaaatcttcctgttctggtgctggggttcaggtacatggtctagtgaaatggcactagacaaatgataatagagtgctagactgggtgaccctgagcaaaccacttaatctcactgagtctggtttcaactatacgaatatctagcttgctcattccacagggttgttgtgaggatcattcattcattcagtttctctttagtgagcacatacttcctgccctggcttttgctaggcattggagaaataatggcaaacaaaacagggaaaggcctacccttatagagcttactttcaagtgatcaaatttgttgatgtaagggagagaacacttcaaatcgattgattatacaagaagttagattttcctgaccattttaaacaaatagcatcccaaagtccaagggaaattttggtcattttattaagaagttgaagtctcaagaaagccagttggatggcagtttagataaaatgattcgggttgagggccagggcagggaaagaatgaaaaccaagtttaaaagtggcctgataggtcaaatggtatttctggttctagatcctcgaggaatcgccatactgtcttccacaatggttgaactaatttatgttcccaacaacagtgtacaagcattcctatttctgcacagcctcgccagcatctattgtttcctgaatttttaataattgccattctgactggtgtgagatggtatgtcattgtggttttgatttgcatttctctgatgatcagtgccatcatcctcagcaaactaacacaggaacagaaaaccaaacactgcatgttctcactcataagtaggagttgaacattgaaaacacatggacacagagagggaaacaatacaccggggcctgctggagggtggggggtgaggggagggaacttagaggatgggtaaataggtgcatcaaaccaccatgtcacacgtatacctatgtaacaaacctgcacattctgcacatgtatcctgtttttttttttttttttaagaagaaatgaagaaaaaaaaaagtggccttatagagctgctttctactaaagttcacttctgaaagaaatcagagaggttttcgactccatcagggttccaaacctgaggagattaccattaaagtcagctagtcaagggtaaaaattagagtgtaggaggattcattttgaaacattgtcagcaaccagctggaaaaaaatagcagcgactgtgattactaggaaatttcttggagggtgtagaagtgtatcaggtaatctaatctgtcacctacttcagtggcctttgggtggttggataagcatttcagtttagaagtaaatatcactgaacaggagggagaataacatggttatttaaaactctgaggccttttggccagttttggatttgttgtcagccagacctgatagctcatccaagtttccttctatgactttttttttttttttttagacagggtctctcactgtcgcccaggctggagtgcagtggcacgatcatggcttagtgcagccttgacttcctagactcaagtgatcctcccacctcagcttactgagttgctgggactacaggtgtgcaccaccatgcccagctatttttgtttgtttgttttaattttttagggacgatatctccctatgttgcccaggctagtctcaaactcctgggctcaagcaatcctctggcttcagcctcccaaaaagctgggattacaggaatgagtcaccatgccccagctgacttctacaggttcaactacaatatttacagagggagatctttgggtcctgggtgaggagggaaactggggatggggtagggatgggtaaaggggtcaacaaattagaggcagacctgcttacagccttctgaagatagactttctgcagaatgaatgtgaaaaggttttgtaaagtgtaatggaccaatttttccctagtactctagggaatgtgtgttccatccatgcagatccttgcatcgtgcctgtaaaatagcaaacatgcaagcaactgtggaaaggatcatctttgccatcttatgttcagtgttccagccataccaactcatttgcagatccccaaatgcactatgtgcctttatagatgctgttttggtgcttggcctactctccccctctactttgccttgctagctcttgcatcctctttaagagtgtacacaggtgccctttccttcctggaggttttcttctctcctcctccaccacaagtctggttcaaatgctccaccttaaccccctcttccctcatttcccaaccccagatatgtctattatagcccatgtctcaataaattgtagtcatttgtattttatggtggagaccaattcttggtaattgaaaaatttgtctgaactttaggggaatcattaaaaaatacataatgccctggacatattattttaacttaaagtttagagatgtgtatttatttgctcatcttttgatatgggcaggccttcgtttttttttttttttttttaattggtctgctgattagagttccggattatctttcttgtttaactcacatccataatacatcatctatgatttccagtgcccgattttttttttcatggaatagaaaccaactgggaaagcaatttaaagactctagattctccctactcccagtattttatacttttcccactcacaccgaattaggttcaactacatttttaagtgacttacctttatcaggtctttgcaaaacatttaactaaactttgacagaagcttttattggtactcatcttctgttgatttacatattacttaattaaacaatgtaattataatgacatgtaatgacaatgataaatggttttgagaatggacacggttggctcctgtaaacacatacctcagttgtgggagaagcagtgcttgtgtatatgagaatggaataacaggtgacccgactggtaggagtagcatgaagtaggcatcagaagcaatggagaatcccagttaatccagcagctcagtggagcacaagttaagggagcaacatagattgagctagcccagtgcctgttcgagtggatattcaataatttgttaaataaatgtgagaatgatccaggaagtcgagaacttctggggatatgagcttcaggaccactggatttgaactcgtaattggccatctcctctacctagaggggtgctgggcccgagtcaaaagcctagaacttaaccactgtctgcaaaatgagactgtgaagagaaatctctctccaataacagggtgcagatttcttgccgaggctgctagctgttgctgacgagtgagtatgaaagtctccctccttgctccctggatgacctctttgccattccttcttgtttaagctcctcttctttggctctgaaacctgtgaaatgtttggagactagagtttcttttgtttgtttgtttcttttcttcttctttttttttttttttttttttttttgagaaggagtcttgctctgtggccagactggagtgcagtggcaccatctcagctcactgcaccctctgcctcccgggttcaagcgattctcctgtctcagcctccggagtagctggggactacaggcgtgcaccaccacgcccaggtgatttttgtatttttagtagagacaggctttcaccatgttggccaggatggtctccatctcttgacctcgtgatccgcccacctcggcctcccaaagtgctgggattacaggcgtgagccactgtgcccgggccagagactagagtttcttgagagatatactactgaaagaagctatctgtattaaaattcagtatgtgtaaactactttaatgaacctggttccaccgtagcatatgggaagtcagatggtaaggggtgcgatgtatgcatcagtgtccctctcctggtatagtcccacttccctgtggataaatttaccttacctatagggaggcactcacaagaagcttatgcacacacacatacacatatgtacatttatgtgttttatttatacctacataaacatgtatatgcacacatacataatgtatacatgtacatctataagctataggtctataatgactttttcttctaaacgtgagaagaaaaatgattttttcttttaaacgtaagtgtgggcacgtggaagattgctgtggttgcaaggtcagctcttgcaatctagggactgtggagagagacagagactaaagtttttcatatgtgtgtggtattggagtgggggttgcttaaattaataagttaatggagagaagtgtgagctatctgaggcatcgcatagagacagggcagtcaggcttatccacaagaaggagcagtgggaattgagtccaagagccagaaaaacatactgatgtagtggctaagagcacgtttcctagtttcaaatagttgtgggtacaaaatctggctctgctacttactagctgtatatctaggcaacttaccttagtgtttcatggtttagtccataagaaagagaataataggacttccttcacagagctggtatgataattagattttatatgtaaagtaatatacatagtgtcagccattcagtaagatacttaaaaatgtgatattcttataaatattaattgtatctggggacagcacaggaacctgctatgggggcactttttggtagtaattgagatctaaagaccctcactgaaccagactctctgattaacactgagtagtaaagtgtagttccaggtactttggggctagggggaatcaacgaagtagatttcaggaccaccacaatgcaggtttgcatataataggagagaggtggccaacatccatagaaggaggacctgaatcacattcaaggaaaatatataaatgaatatcaacgatgagatcctatcccatgcaggggttgagataccctgggcagtttgtttcacctgcctttaatcactgagattaacactcaaaggctgagagctagttaaaatgtatctgcctcctgcctatttccgaaaccagaatagaatgcctgttgcttcccttcccccatccccagcccactccaagcctgttctttatcccttatattaggaaggatttgcccatgacagtcttgagacctaatgtcagatacacttgggatgcagatcttttattgaagagaaggttggacttgacagtgagaggggttgagatgaatgagtttccattgtatttatagaaactcagtgcaatatctctcaaggtataaatagaacaatgaagtgttgacaaaggggctggttttctgtaactgtggaaaccctgcaattattcctggaactacactcattgtttatctgcatctgaattttaataaacagggctcttgctgcttattcatgaattttcaaatggaaatatctctcccattattatccccttcttgtgagtcaggccccatcttgcaaatttgcagctgagtaaatatacggaacattagcagcaattagataattggtgccccggatcagcccacccacagctgtgaatgaatatgggctgcatgagtgtcacctggtgcagccttcctgatggcactgcatgccaccacagtcttgcaattaagcacagaattttaccagccttagtcctggccctcctttctcccaagagacccagactagcaaggtaagtgaggttccctattcttccagctgtcatcatacaatgagagatgttaggccaaagaagttggtaaagaagagaaagtccatgtatcttcgcttagctgattgctaaattgcttctgataacttgtttggtgcatatagccagcaaaaattcatgtttggatctgggctggggagttgggtcataaatcctgtttttctgtaaatctcccaaaacttgctagctctgggctggccacatttcttcccccccatcatcagttttttggcctctggcattaacttgggattccttttagcagccatattttaatctctctttcctttggataatatttcttccaggcctcagactgcactgggtgcctttgccagctcatgctttgctcctgttcctcaggcaatcacaaagcccttttgaggcatatagattttgttttttaattgctagagacttcaggaaaacagagtactattgcaaaagggaaagtggcaagagggctgcgcctgctattatgacattatgatggaggctcattagcgtgcagtggagccacttcttttcctcctctgccttggccacctggcccatctcctcgcttttgcttttggttagacagcaattctgtctagccctccagtctctcacactcattctccagcctcacactccctggaagctttcccaggttacttctttccttttttattgcatccaccttctgtgtgtttgggaggaggcgggtagagagggagttggaaatagtgaggtagagggggagatttgggttgggtgtttggatctgggaatgcgtcacatggaattcattcatctcctggagatccttccaggccacctcactgtgtccctgcatagcaggaatgtcatattgggcaatgaacagtggtctccaaggaaagctccagaagaagttgaagtctgggtgggattttgtgccaattctcccctgtttttttgatatgtaccatccctttataggcatgggatacattatcttttgtttattattagaatttttttacattgctaatatttaacatcattcatgtaatactaaaagtacatttcctgtactgagcacctactctgctttatgtacaattatatatcttttcagcaccccatgagattaatcttatgatgtccatttgacagatggggaactcagattcagagaagtttaggaaacattacaaggtcacaacagctagtatgtggcaaagatggagtccacacttaggcttaactaattgcaaagcccatactctgaaactgtgctaaattgcaggactcaagtcattttgggatacaattaatgtctgacttgttctttgcttgagagtgagatgttatctgtatagcctgcattttggttccttaaataatgtgtccaatttggtgaagccattaaaaacacaaactcaggcagtggtgttggtttttttttttttaattaaaaaaattttttttaacctttgctgaattttcccttctagctagaaactagttttcccagtactctcttggttcttactgctgccaacacatcagatgtatcaaccacctgaaattgggctgcaggggtagaatttatttgcaaacattttaatttccctggtgataagcaaattaattttgttgcaactctttaacattctaatcgaatgatggaatgtcactgaatgtattttacagatcaaagacagccaacgtcttcccatctttcagaaaaaacagagctgagacctgagtctgcattttcctttgccctatagcccaacccagcttatcctcctgagcttgagaaaagtcatttgactgaggctgtcaaatctgcaatccagccaaagtgctggcagtcacctgtgctggggaaggacctttgcttcatttattcatgtatcacatatttcttaggtgtctactatgtatgtaccaggcactgttctggctcagtagtgaaaaaaacgggcaagtctctttgctgttctctcagaggaggcagaggataaactaatgaacaaatgcaatgtacaatccatgaagaagagcaaagcaacataatacatacagaatactggggttgctgtttgagagggcttctctggggaggtgatatttgagaaaagccagaatgaagtgacgaagaacatttcagccagagggaacagcacatccatgaggtttatgctcatcttcagatcaaacccccacccccacctcatccagagcaatgaattgtcctgaactgaatattctgtagttgtccattcttgtggctcataggagctttctccagaccaacttctttggaaaatgcttatttcatctgagttcctctctcattaagaagtttagggaaaagtagacagcatcaccataaaaaggcaacatgtgaagcatgaggaggaggggacagtaacatggatttgcaatttctgcctctgttggccaagcagtggcatttgtgagtagatggaacaaaatgttgggagattagatggacgtttccaggatcatccattgcaaatatttatcaatttcttattatgtgctagagcttgtgagatgaggtggaaccactttggtatgcaagtcccttcatcaataatttattattgttattaatttatttttattgaacaaatcttagctgtcattattcttgagcacttacaatataccaggtactgttctaaccactttacatgaattaactaatttaatcctcacaacaggcctaggttcttttattgtccatgttttatgattgagaaaaaggaagcacagagaggttgataattgcccagggttgcacactgacatctgatccaggttttaaacttggacagtctgggaatgaacatctgtaatttactgcgggccatgcactgtggtgagagctgtcagcttagtgcttttaagtggtgagagctgtcagcttagtgctcttatctttacatgagaaaactgaggctggaaaggtcaagcgtcttactggaggccacatagttgggcagctgcagaatccagaatctaacatgaaatctaatctttctggccgtaaggctgtgttttaagggctctgttaagctacccttcctagcaatccagctcaggccacactcactttctgggagtgcagggaggaccagagctagctcctgccttgggcaatttcccagcaccaagttgtggcccctcctctgccttgcatttctgcatagagacagattcaaggtgagaactggcctctggggattatggtggagttgtactggaaggacttttggaagcatcacaggctactgagtccagggtattgtggctctgggacaccttgaggaaagttcagagttggggatatttgagctaagggtgttgtcctgtgagttctgtgcctggaggacataggaagggaagggaagggaagtgaaggaggatggaactagtttatgccaagttaatcaccactgcctgccccgcttttccatatctctcatgatgtttctatggcacccttccaataaccaagttaccattagttttcaggtttttgttcttattgtactggatcctcagcacataagtttctcccctttcctactctcgtgattcttccagataataacaacaatcaaaagtagcaacaaataatttggctcattcttcccactttacaaagtactttatgtatgcatcatctccttgaatccggttaacaaccttgtgaaatatcattatttcagacctgtaccagtatgaggaaatgggggttcagaaaggttccttgacctgcctgttgccacacagctactaagtaactgccagagcccaattctagttgcttaactcttcccctttctgccacgcagcctctccaaataatttcctaattagtctatttaacgattctctgtcaagctggcttcagttgcccttgcaaagacaagcttgagtgaaatcaaatgatttcactgctgaatgaaaacatttgcatgatgctattttctaagccatcctcacatgtgagtctcttggctcaggaagccaatccaggttgggggagagctgtagaggctgaggagggataggattcctttcttgtcataggtgagctagttagaattcccagagcctggcagcgtgttccttgaagggccagtatgtctagggaaggaagagacagaggaggcctccatcttgtaacaacagtaagtgttcctcttgctgagaaaatgctcacagctgaaggatagctatggacctactgcttccaacataggaaccctctttccaagtggtcttggcccctaagtaacccagatgaggacaaactggataattcagtcaaggaaaattaacaagcacctactgtgtgatggggatatagcaatttataacccatggtcttgaggggtttgctttccagtgggtgacagtcagtaaacaaaataaattattccgtatgttagaaaatgctatggagaaaaataaagcagggtatggtatgtgctatgggtgggatttcagataaacaggatttaaagtaactgggcaggttttatttattttcaagatgtgcattcagtttattaaaaaaccccaaacacgaaaatttgcacagggccaggcagtgcaatataccagcctttctcaagtgtgtgtgcgtgtgtgtgtgtgtgtgtgtgtagtgtgggtgcgtgcatgcatataaaatgaaacttcaaagtgacaagaaagcttttactccaggcaggtgctatgtcacctttcctcatctgtgctcttcccaacacaaggttgtcatctttgttgcatgtgggtggtggtaacaaagaagaagtcccaaccctcctcagcctcagcagcctcctgtaaacctgagggaaaaatcagctttcaccttttgtccttttctgtgggatgtttttctttttcttagctcatgtcatcatgctagctgtacgttttttgggtagatattctttaccaaactgaggaagttcccctctgtttctagtttgctgagagtttttatcatggtagatgttggattttgtcaagtccttttcccacattgattgatgtgatcgcagggtttttcttctatagtctgttgatgtagcggcttacattggttgattttcatattgaaccaaccttgcatatctgggataaatcccatttggttgcattatataattttttttatatattgttgagttgatttgctaatattggttggggatttttacatgtgtgttcatgagagataattcgtctgtagttttcctgtcttacaatgctgttatctggtttgggggtattatagaatgcttctgttttctagaagagattgtagaaaattggaatcatttctttcttcagtgattggtagaattcataggtgaaagcatcaggcctggtgatttcttttttggaaggtttattattgactcaatttctttaacagaaatagggatattcaagttatttatttctccttgtgtgagttatgctagtttgtgtctttcaatgaattggtccattttatatgaagtatcaaatttgtaagcatagttatctgtagtagtaatttattatccttttaatgtcagcagaatccataatgatgactagtcttttatttctgatattggtaatttgtgtcttttttctttttttcctggttatcttcatgagatatttgtcatttttattgatcttttcaaagaaccagcattaggtttaattaattttctctattgtttttctgttttcaagttcactgaattttgctcaaatttttcttctttctttttttctcacctgctttaagcttaaattactatttttcctctagtttcctaaggtgtaatcttaggttcattgattttatagctttcttattttctaacatatgcacttaatgctatatttttcctgttaggcactactttttctgcatctgacatattttgataagttgtattttaattttaattttgttagaaatatttaaaaacttgtcttcatttttgacccaaagttatttagaaatgtgttgtttaatttccaaatatttgggaatttttacaactatctttttgtggttattggtttctagtctaattccactgtggtctgaggacatactttgaaggatttctattcttttaaacttgttaagatgtattttattgctccaaatatggtgtatcttggtgaatattccatgccagcttgagaagaaacacatattctgctgttattagatggtagattttggagtttcatgccagttttagattcagatcaagaccacagacttccctgcctttctctctgagcccatacaatgctgccttcccagtagggaagctcccagcatggttgaaagttaaatgagggtaactttcaatcagacaagcaaccaagtcacaggcattattaggaagaccagagtcaagaggacagggaggagctgggtgatgggtcataggctaaattatatgtggggttgggaggaatgagtataatttaagctcgtgttgtattaccacctgtgcttggtactccataccaattattttgtgtaagctaccttagtactctccaaagtaggtgggatggctaattttgtgtgtcaacttgactgggttaagggatgcccagatagctgggaaaacattatttctgggtgtgtctgtgagggtgtttctggaagggaccagcatttgaatcagtagactgagtaaggaagattccaccctcaccacggtgggtgggcatcatccaatctgttgcaggcccaaatagaacaaaaaggaggagaaagggagaattcactctctctcttcttaagttgggacatccatcttctcctgtctttggatgttggagtttctggttcttgagcctttggactccaggagttacaccatcagctcccctggttatcaggccatcagacttggactgaattacctattggctttcctggttcttcatcttgcagacggcagatcatgggacttctcagcctccataattgcgtgagccaattctcataataaatctcttcatatgtatctgtatatcctgttgtttctgtttgtctggagaactctaatacagtacagtacatcgaaggggtaggtgaaacactagatcttctgtttttgtttttgaatctcattgttttactatttctgtttctaggtgtattttaaaatgtatggaacatagtagtagaaaactataaagcagataaggactagttcttatcacctccactggtaaaaccctggtgtagtcaccttgatctctcactaggattattgcagtagccttagatctattctccctgatttcagccttcttgcagtgtgatcacaccaggtgattctcttacacacaggtcaggccacgccaccctcttctctggctttctggtgtatgccaagtagagccaaagttcttactgcttatcttctcccgtgctgctctcacctctctcctgaccacccatttacaggagtctccttgctgcttccacctcagagctcttgcagtggagttccctctgcctgaatcctctttccccaaatctattcaacttgcttccttaatttctttaagtcttttaaatttgtaccctgctgcatttcccagtcccccttcctgcattatttttttctcataacattttcactgtcggacaggtaatttacttatttattttatgtattgattatctttcccaaactagaatataagatacacgaggacaaggtttttgttttggtactgctgcatttctggagtctgatatctacacggaaggtcctcagtgaacatttgttgactacatgaaagaataaatattgcaggagatgttaaactttgttgagtgatggggtgcataatgaaaacattaggtagcctaagagaagtaaggctgagttcatgctgctgctagaaagagggagagctgagtttcaaattcagggcttcctgatgccaatgctcacactaatccaagatgccatgggggtcggggagggggcaagagagagagacagggagacagggagtggggagagagaagaatgaggatgagaatatgaatgagaataagaattgaacttaaaagaaatcattaggaccaaggagagcaaataggacccacgtttagtcagcaggcagttcttttgggacaagaaatcatcttaattcctccaggacctttaagatctggttgtctgcggaatgttttggggttgggggagagtttctttatctcctgcaagttccctgaagttgagtctcaggtcagtggagacagatctccctccatggtggaccattgtcatctctatttgtagggtttcacttagtgagttagatgtcagctggcactgcagttctgactggaagagagaaagcacttgaagagcttccctaccattgagggagaagtcatttttctaattgtcttctccaccaaaaaagaagtatattctagccttgaaaatggcagcatgggccaggcacagtggctcatgcctgtaattcccgcctttggaaggccaaggcagaagaatatcttgagaccaggatttcaggaccagcccaggcggcatagcaaggcctcttccctatgaaaaacaaattagtcaggcatggtggctcacacttgtaatcccagtttcttggaaggctgagatgggagtatcacttgagcctaggagtttgaggctgcagtgaattatggttgtaccactgcactccagcctgggtgacagaggggagaccctatctctaagaaaaaaaatgtaaaaaaaaaaaaaaaaaggaaaaagaaaatgtcagcatgcagtaaaacaaaaagaaagagatgttctgttttgacctccttcaggtttccttctgttctccagttccttttcctactcagagcattatttcttcctttccagtcccggacacctagagctcacccacaaggcgcccagcattgttgcctgctgtctgtgtgagctggtcttctccactgggctctttgtgggtccttctctttttccctttcagttgctacctttgtttatgagtgtcttctccctgatgatcacatagaaaaccctggggcagtgacaagtaggagacctctgagggcaccacctgcatattgtgcttgtgagatagtcacaccatccaaggaaaacaattacagcagaaaacagagggtcagagctgggcagtttgatgaaatttaagatttaaaaagcctcaggatactgaattatgttaatcataagtcttagtccatttgggctgctataacagtataccacagactgagtaatttataaataagcaaaaaaaagtgtatttgggccaggcatggtggctcacgcctgtaatcccagcactttgagaggccgaggcaggtggatcatctcaggtcaggagttggagactaacctgtccaacatggtgaaaccccatctctactaaaaatacaaaaataaaattagccaggcatggtggcaggtgcctgtaatcccagctactcaggagactgcggcaggagaatcgcttgaacctgggaggcggaggttgtggtgagctgagattgcaccactgcattccagcctgagcgacagagtgagactccgtcctcaaaataaataaataaataaatgaataaataaataaataagagaaagaagtgtatttggctcaagttttggaggctgaaaagctcaagatcaaggggcccctacctggtgtaggcctttttgctgtgtcatcccatggcagaaggtagaaaggcaggatagcatgagagagcaagagagggcgaaacttgcctttataacaaactcacccttacaatgatgaacccgttccctccataatgacattcatccattcatgagggctctgaccttcatgacataatcacctcttaaaggtaaccacctctcaacactgttgcattgggggttaagtttccaacacatgtgctttgggagacacgttcaaactgcagcactgtagaagaaaggtttgtgtaggggggtgcctctgaagtacaattagagtctgagaaatctgatcccactctgacccttccctatggtatctactgcaggaaataaatctggagcctatccaaggaggaatagattgcagtaatgggcccctgctttgaggaattaggtgtgttgagtgtgagaatttcagtaaagaccataacagaaggaaactcagttctgaggtcaatgtgatgaacaaagtaggcccgaggaactggaggaagtccaggaaagtgggagaaatgttaggaatatgccattatggaaatgactatttgtctacagttattaagaatgttggaaaaaagaaaaattctggttttatttcataaaaataaagaagggaactgtctaagacagtgctgtccaattgaaatataacatgtgccacatctgcaatgtaaattttctcatagccaagttaaaaaaggaaaaagaaacaagtgaaattaatttgaatgatatattttaatttattcaatatatccaaatcttatttgaatgtgtaattactataaaaatattaattttatatatatttttcatactaagtatttgaaatcttgtatttgacacctaagcccatctcaattctgactagccaccttccaagtgctccgtaattacatgtagctaatggctgccgtattggacagcacgggtctagaaggtcctcttttcttttctaaaatcctgattattttattccttcctcattataagcataccctggttttgcttgtccttcatgcttcagtgtctagcgtgtgtgtgctgcatgtggctttggttaatggttgcaggggtataggtttgtcaatgtgattgaatataagtaattcgagaatggagctatgtctttttacttccgtattccttgactctgaaagaattcctcgacttctgtattcatctgaaagaatggaaaggttgtggagaatggatggtggatgcccagggaaagacattactccatatctctatctgatcttagactaaattgcttcgcttctctgctcttctccttctccgttaaatggggatggtgggatcatttatacctgcctccaggattgttttgaggctaaaggaacactgaatataaaagacacttggaaaaacaccatgcatgtatgtgagggtgtatttattactttaagatcattgaaatcagctggtttgtctctctctcttcatgtgacggtaatttctttgccagcaggaaaccatgagaattatgtgaatgagaattatgctcttgccgagattggaagtgtgtgaatgtatgtgttggggtgagggggaacaaatggatatggatctgaaagttgtctgatgaaagatttccccactttgtgtgtaagtccatgttagaaagctaattagaaagccaggtgagctttctgctcataggtttttttttttttatactttaagttttagggtacatgtgcacaacgtgcaggtttgtgacatatgtatacatgtgccatgttggtgtgctgcacctgttaactcgtcatttaacaataggtatatctcctaatcctatccctcccccttcccccgaccccacaacaggccccagtgtgtcatgttccccttcctgtgtccatgtgttctcattgttcagttcccacctatgagtgagaaaatgcggtgtttggttttttgtccttgcaatagtttgctgagaatgatgatttccagcttcattcatgtccctacaaaggatgtgacctcatcattttttatggctgcatagtattccatggtgtatatgtgccacattttcttaatccagtctatcattgttggacatttgggttggttccaagtctttgctattgtgaatagtgccacaataaacataagtgtgcatgtgtctttatagaagcatgtttataatcctttggatatatacccagtaatgggatggctgggttaaatggtatttctagttctagatccctgaggaattgcctcactgacttccacaatggtcgaactagtttacagtcccactaacagtgtaaaagtgttcctatttctccacatcctctccagcacctgttgtttcctgactttttaatgatcgcccttctaactggtgtgagatggtatctcattgtggttttgatttgcatttctctgatggccagtgatgatgagcatttttccatgtgtctgttggctgcataaatgtcttcttttgagaagtgtctgttcatatcctttgcccacttgttgatggggttgtttgtttttttcttgtaaatttgtttgagttcattgtagattctggatattagccctttatcagatgtatagattgcaaaaattttctcccactctgtaggttgcctgttcactctgatggtggtttcttttgctatacagaagctcttgagtttaattagatcccatttgtcaactttggcttttgttgccatggcttttggtgttatagacatgaagtccttgctcatgcctatgtcctgaatggtattacctaggttttcttctagggttttgatggttttcggtctaacatttaagtctttaacccatcttgaattaatttttgtataaggtgtaaggaagggatccagtttcagctttctacatatggctagccagttttcccagcaccatttattaaatagggaatcctttccccattgcttgtttttgtcaggtttgtcaaagatcagatagttgtagatatgcagcattatttctgagggctctgttctgttccattgatctatatttctgttttggtaccagtaccatgctgttttggttactgtagccttgtagtatagtttgaagtcaggtagcctgatgcgaccggctttgttcttttggcttaggattgacttggcaatgcgggctcttttttggttccatatgaactttaaagtagttttttccaattctgtgaagaaagtcattggtagcttgatggggatggcattgaatctataaattaccttgggcagtatggccattttcacgatattgattcttcctacccatgagcatggaatgttcttccatttgtttgtattctcttttattttattgagcagtggtttgtagttctccttgaagaggtccttcacgtcccttataagttggattcctaggtattttatcctctttgaagcaattgtgaatgggagttcactcatgatttggctctctgtttgtctgttattggtgtataagaatgcttgtgatttttgcacattgattttgtatcctgagacttcacttaagttgcctatcagcttaaggagattttgggctgagatgatggggttttctagacatacagtcatgtcatctgcaaacaggaacaatttgacttcctcttttcctaattgaataccctttatttccttctcctgcctgattgccctggccagaacttccaacactatgttgaataggagtgatgagagggggcatccctgtcttgtgccagttttcaaagggaatgcttccagtttttgcccattcagtatgatattggctgtgggtttgtcatagatagctcttattatttggagattcatcccatcaatacctaatttattgagagtttttagcatgaagggttgttgaattttgtcaaaggccttttctgcatctattgagataatcatttggtttttgtccttggttctgtttatatgctggattatgtttattgatttgcatatgttgaaccagccttgcatcccagggatgaagcccacttgatcatggtggataagctttttgatgtgctgctggattcagtttgccaatattttattgaggatttttgcatcgatgttcatcagggatattggtctaaaattctctttttttgttgtgtctcaccctggctttggtatcgggatgatgctggcctcataaaatgagttagggaggattccctctttttctattgattggaaaagtttcagaaggaatggtaccagcccctccttgtacctctggtagaatttggctgtgaatccaactggtcctggactttttttggttggtaagctattaattattgtctcaatttcagagcctgttattggtctattcagagattcagcttcttcctggtttagtcttgggagggtgtatgtgtcgaggaatgtatccatttcttctagattttctggtttatttgcatagaggtgtttatagtattctctgatggtagtttgtatttctgtgggatcggtggtgatatcccctttatcattttttattgcgtctatttgattcttctctcttttcttctttattagtcttgctagcggtctatcaattttgttgattttttcaaaaaaccagctcctgtattcattaattttttgaagggttttttgtgtctctatttccttcagttctgctctgatcttagttatttcttgccttctgctagcttttgaatgtgattgctcttgcttctctagttcttttaatggtgatgttagggtgtcaactttagatctttcctgctttctcttgtgggcattcagtgctataaatttccctctacacactgctttgaatgtgtcccagagattctggtatgttgtgtctttgttctggttgatttcaaagaacatctttatttctgccttcatttcattatgtacccagtagtcattcaggagcaggttgttcagtttccatgtagttgagcagttttgagagagtttcttaatcctgagttccagtttgattgcactgtggtctgagagacagtttgttataatttctgttcttttacatttgctgaggagtgttttacttcccactatgtggtcaattttggaataggtgtggtgtggtgctgaaaagaatttatattcttttgatttggggtggagagtgctgtagatgtctattaggtctgcttgatgcagagctgagttcaattcctggatatccttgttaactttctgtctcgttgatctgtctaatgttgacagtggggtgttaaagtctcccattattattgtgtgggaatctaagtctctttgtaggtctctaaggacttgctttatgaatctgggtgctcctgtattgggtgcatatatatttaggatagttagctcttcttgttgaattgatccctttccattgtgtaatgacctttgtctcttttgatctttgttgttttgaagtctgttttatcagagactaggattgcaacccctgcctttttttgttttccatttgcttggtagatcttcctccatccctttattttgagcctatgtgtgtctctgcacgtgagatgggtttcctgaatacagcacactgatgggtcttgactctttatccagtttgccagtctgtgtcttttaattggagcatttagcccattttcatttaaagttaatattgtgatgtgtgaatttgatcctgtcattatgacgttagctggtgattttgctcattagttgatgcagtttcttcctagcctcaatggtctttacaatttggcatgtttttgcagtggctggtaccggttgttcctttccatgtttagtgcttccttcaggagctcttttagggcagtcctggtggtgacaaaatctctcagcatttgcttgtctgtaaaggattttatttctccttcacttatgaagcttagtttggctggatatgaaattccgggttgaaaattcttttctttaagaatgttgaatattggcccccactctcttctgacttgtagagtttctgccgagagatcagctgttagtctgatgggctttcctttgtgggtaacccgacctttctctctggctgcccttaacactttttccttcatttcaactttggtgaatctgacaattatgtgtcttggagttgctcttctcgaggagtatctttgtggcgttctctgtatttcctgaatctgaatgttggcctgccttactagattggggaagttctcctggataatatcctgcagagtgttttccaacttggttgcattctccccatcactttcaggtacaccaatcagacgtagatttggtcttttcacatagtcccatatttcttggaggctttgttcatttctttttattcttttttctctaaacttctcttcttgcttcatttcattcatttgatcttccatcactgataccctttcttccagttggttgaattggctactgaggcttgtgcattcatcatgtagttctcgtgctgtggttttcagctccatcaggtcctttaaggacttctctgcgttggttattctagttagccattcgtctaattttttttcaaggtatttaacttctttgccatgagttcgaacttcctcctttagctcggagtagtttgataatctgaagccttcttctctcaactcgtcaaagtcattctccatccagctttgttctgttgctggtgaggagctgcattcctttggaggaggagaggtgctctggtttttagagtttccagtttttctgctctgttttttccccatctttgtggttttatctacctttggtgtttgatgatggtgatgtacagatggggttttgttgtggttgtcctttctctttgttagttttccttctaacagtcaggaccctcagatgcaggtctgttggagtttgctggaggtccactccagaccctgtttgcctgggtatcagcagcggaggctgcagaacagtggatattggtgaatagcaaatgttgctgcctgatcattcctgtggaagttttgtctcagaggagtacccgggcatgtgaggtgtcagtctgcccctactgggggttgcctcccagttaggctactcgggaatcagggacccacttgaggaggcagtctgtccgttctcagatctccagctgcatgctgggagtaccactactctcttcaaagctgtcagacagggacatttaagtctgcagaggtttctgctgccttttttttggctatgccctgcccctagaggtggagtctatagaggcaggcaggcctccttgagctgaggtgggctccacccagttcgagctccctggctgctttgtttacctactcaagcctcggcaatggcgggtgaccctcccccagcctcactgccaccttgcagtttgatctcagactgctgtgctagcaatgagcgaggctccgtgggcataggacccgctgagccatgcgcgggatataatctcctggtgtgtcgtttgctaagacctttggaaaagcgcagtattagggtgggagtgacccggttttccaggtgctgtctgtcacccgtttctttgagtaggaaagggaattccctgaccccttgcgcttcccgggtgaggcgatgcctcgccctgcttcggcttatgctcagtgcgctgcacccactgtcctgtacccactgtccgacactccccaatgagatgaacccggtacctcagttggaaatgcagaaatcacctgtcttctgcatcgctcacgctgggtgctgtagactggagctgttccttttcggccatctttgatccaccccagtctgctcataggtctttaaagtaaacaagtctgtcatcagaggcaaattccccttatccaagtgttcagtggctctgaattccaagagctcacggcattgtgttactaacctgtacccaggagaatggacaccttcccctctgggagccttagaggaacatctggtcttgtcttgtcctgagtgttcgtacttggcctttcttcctatgagggcacttgtttgtaaatggttttacactttattaagcaatcagtttttgcttggaactaaactcgtgctaatttacctggattaatgctgtaggccaacgtggtgggtgatgagggttgggtaaggcctgcgtgtgccatgagagtggggaagtctgacctaaaccccaggaccaacccaagcttctcatgtctcatgcatgttccatgtggaaggcatttgtgccatcccaccatatgacgacccccagggggctctccgttggacacctctttattccttttctccccatctagtttgctcaattgctgttccaaagttgctcctcctcagaaatcttcaatagctctctgttgtcactgggacttcagaggcatctgcaatctggttcctatttatacatcctgtgggtaaaaaactgccctattcccactgaatgagccttgcctgccccatctccattcctctgccctttttttccagagcttctcccccagaataggaccagcagtcccagttgacctgggactagggctacttgggatgcaagacttccagtgttcaatctggtatgttccctgctccaataccatctctagttattgacatttgcctgtttttagggtactgctgaattccctgttgggcctctgtggtttagctctgattgtctgtccatccatatggtgcaggcattgccttttgccataagtatttgtgttcactcattgtctcccaatctgaactgtaattaatttgaggatgaggatcatgtcatattctgtggattctttcaagcacctagcacaggactttcatgtggtagatgttgagatattatttgctgcatgaaggaatggtgaataaattaccattgaataaattacgtagttgtaatgagagaatgtattgtaactatgttgatggatttttattgttttgttgattgcaaaagaatatatattcattgtacttttgtggaaagtttgggaaaaatagaaaagcatacatatatctcttgtaaacccactatccagaaatacataactactattaatatctttgtgtgcatccctccaacgtcttccctccttcctatccttctgtttgtccagtcatcatctgcatatttccatgtctttaaaaaaaacttggatcttatagtacatatagttttgtatattcttagaagggatatatgtgtgtgtgtatatatatatatatatataagatgcatacacgcttacctatatattcatatacttatatatatacatatatcccttctaagaatatacgtgtgtgtgtgcatctcctttttaggggtccccaacccctgggctgtagaccagtatcagtccgtggcctgttaggaactgggccaggtagcaggaggtaggtgagcggtgtgcaagagagcattactgcctaagctctgccttcactcagatcagcagtggcattagattattataggagcatgaaccttactgtgaactgtgcaggcaagggatctaggttgcatccttcttatgagaatctaatgcttaatgatctgagatggaatagtttcatcctgaaaccatcccccaccccaccttcccatcgatggaaaaattgtcttccacaaaaccggtccctggtgccaaaaaggttggggaccactgctttatatatataacagttctatctatctatctatctatctatctatctatctatctatctatctatctaatctatctgtcatctcttttgttccatttgtgtccataccatcaggtttttttttcttttttaaccaatccaccattgttgaacatttaagtttgtttcagaaattttgctcttatggctctttgttccatccctcattatttccttaagataaatgcttagaagtagaatttctgcttctaagattaaaggcttctgagtgatttttaagattcagggtgctgcttgtagtttgcaggtcagcttaacctgtgatcttgcaattctagtgctgttctaagatttgggcagtggaggtttgaggagacttagttctactgcagggctgagaaaacctaggcaagactgagaattaacttggtttatggttgatctggattctgggagtttgtgtgtgtcagggatgataataggaagttgattgaagccaagaaaatggttggaaaccaggttaggacagtgagagtagaacgattaggtgatgtcaggacaaagacctggggatatactgcactaaatatgaggaccttgaagctgggatgaatcctgcctcaggctcaaggccgtttacacttgacctatcagaaatcaaaggataatttctgtgatggggctctcctagggcctgcagacccaaagagcatctgtatataacccctggaaaaatcctagtatctggctgatcttttctagctctagattttctgagctcagcaaatgatggtggaagtccaggctcactgagagactagtcctataagtcacaaacctggggtagattaggaataatgaatacaaatgaccagttctggtgacccagttataagaggactccatctgccttaagtctcttaatctcaacaattacatcccaggccagatgtcacactataatgtaatataatattgctagtaatatttcaggaaatcattgcagagtgggaatgttctgaaagactggagacaagcaattattcctattttcaaaatagttttatgaactcagattcatgagttagtttaaaatcctaggcaaaagattctataatagattatttaaaaaatggtatgtgtaactttggaaaagcaaatagtagtcactaggaatcatcatgggataaacaagaagcacatgttgttcagctaacctcattttctgttttatggtacacgtgtatatcctactttcagcaagacatttgaaaagtctctctagattaccccaggctcaagactgagacctttgggctggatcagttattcatggaatgatatgcccagagtacatttttaatgaagcaatcttaagccagatacaggtttccagagttataaagttctattcttgatcctgcattgttaacatttcctttaatcaatgacaaagaaagaaatatgtaggtgacatgaagatgggagacacaatggatatgttggatgaaagacttcagatccaaaatgataagttcaggcttgaagaaatgaacttaatttatcaaaatgatggttaatagggtcataagctaggttttatccttgcattaaaaaagtaaaacaactgcacaaatgtgtgatagggaggtttggcgtatccatatttcagaaggtattaggtgtcaagtgctgtatgtatcaggctgcatgagtggaactacagaacctgtcatgatggagagtcctgccctggcactgcttctaccacgcctgtcaggaggtgactcgttttgggcccagaacttggagataaaacaaaaggcagacagtgtgctgtaggggaaagcacatgacaacttccaaatctgccaacagactatgtgtagcttggggagtgagtgtacttaatctctctgagcctcagttttcttatcagtaaaatgggccaagagaacttgaccttatcaagttttctgagaattatgtaatttatgagcattgcttagaaaatcaccttgctcagacttggtactcagcaaatcttgaatttcttttggttgtccctgctattgggaatgaacaagattctaagagtcaaaattcatgttaattgaaggtttgcagtctggagaagagtggacgtcagagcatgtgagatgtatgcatatactctgccagacattattctgaacaatttatatgattctctcatttacctttctgaatagtccaatgaagtatatactgtttgtatcggcattttacagattaggaaactgaggctcaaggaatatgtgccacagctaatcagggacacagctgggaccagaacctgatcttctgcctccccgtctgtactactgtgctgcatctcttgcattctagaagaatattgaaaattggcaagtgttagaggaggtgtttgtggtgaatggagggctccatctgggttgattcctaggagctgtcagtgtaagtcctataccagccactgaccagataggacatctcttttcattccctgcttctacctcccgcttttctctccatgttttcctcagctgggcccttagggcatttttgtgaacaactgctatattagtcttttctcacgctgctatgaagaaatacccaagactgagtaatttatacagaaaagaggtttaattgactcacagttccacatggctggggaggcctcaggaaacttataatcatgttagaaggcacctcttcacagggcaggcaggagagataatgagagccaagcgaagggggaatccccctataaaaccaccagatctcttgagaactcactcactattgccagaacagtttgggggaaaccaaccccatgattccattatctccacctggtcctgcccttgacacatggagattattacaattcaaggtgaggtttgggtggggacacagagccaaatgctgagtttaggctttctgttctaccctgtggatcaccctatggtctggggccagggggccaaggttgaattggatgcagagtgtatttatcatggttggaagggcaggtactgagtagggtttaactgcatgagtgaatgcattcccaaagagagccagaatctgtctggttgtctggtgtctccgctgagcccgcattcccttgcctagtttctgctgacatgaccttcttgtgaggaccctggagggagcttttgagaaacaccatcaccctccattcattcacatatgctccagacagctacttctctggcatggggcaaaataaatgatctttggggatatcatggctatcttttcgaaggtttttcttagatcccagcccgaggcagagatgcaaattgatgtgtcttcttaatctgcatcttcatttactgagtcatgttccttctgggagaaagagcagggcttgtgatttaactctaaatcatctctatcccagaagtcactgccggggacacttccagaagaggctacctaatccctgactttcccaactctgacattccccttcaactttcttgggaggctcagtttccctgtcacctttagtctaccttccagactctaggctttggatcacactgccttgcccactgtgatgtgtctccatgtcctctgtacatctggaacttacatgcttttccagtttacaaatcaaccctgctccatggagctgcccaggttattgagcctgtgtagatttaccgagctgtgagtaacttaaggacaggaacactcatccctgtatctagaatttgcctgatgctcagtagacactgttcaaagcatgagtgaggacaaatgaagggaggaacatcaattggcaccatttagcccttcattcatctctggttgtttcatggtggtgacattgatcccaccttccagctatgggctcagaagtcagaggcctggttccaaatctcagcccttccagtaacttgggaacatttggtaaattctctaaacctcagtttctttaacactggggaatattttatagggttagaaggaataaatgagattatggacacaatacccttactgatcacaacaaacattccagaaatatgcgttagctctcgtgtaaatatctggaggacagaacatcatcttatattactgctgctggtttggtgtttaattggccctcagttaagtccatcttgagtgcttattggataagagctccaacatgtgcaaagtaagcaagaaagggcttaggcaagggggctgccacatttataatataacaggattgtgctagcttggaggcttaatagcagacattttgtgtacaaaatgagaaacagaagcatgaggtcagggccattgttacatcagtgttctctgttgtctttgaacacgatgttcctaaaccgtagtgcttgcatttgaaaggcaggtcactctaggacgacactgcttttaaagattataatagatgctggcaagagaagaacactcagaaccaggctctgcttcaggaagttaaaaatgccaaatgccagtgcctttgctgtgcccccaagggggtgggggcagtatgaaatttactagaaagatgaactcccatgtcagtctccttaaatgggatgagcctctgctcttgcacgcgtgcatgctgctgctgctgtttaaaagcttttatcttgggctaaaatgtgcatattgtgggcagagctatctctccacttcgctgaaaaaaatcaccatgctaacaggcagggatgggaaaggggtctgccacagcagtgctttaacatctagatggcctatttagctggggagcttgtgtaggtgtgctgggtatagcctggtgtatgtagaatgagggtcagcctaggggtgggggtagctggacccatgtaggctcagtcctcaggggagaaggagggcctctttcaggccccattcatggtctctggtatctgaaggtcaaggggctgagcaaacagtggaggtgggagcccagtggcagagttggggcaatcagcttacagtacataagctgataaatcagtgatagatttgatttccatgcaagaactgatgtagattgtcatgggcataagcaaaaaaataataacccgtgaacttacagaatgctttatgctgctgaaaatgctctggggcccatgagctcctctgatgcccccaggagccctgagaagtggggaaggcatgtactactctcccttagcagaggtgcagagagggtcaagggacctgcacaaggccaccaagctagttctcaaatagctagacctgatgtccatactaatttctgtgatttcttcatttgtgcattcactctttcatcaaatctttgataatttttttttattttttagagacagggtcttgctcttgcccagactagagtacagtggcaagatgagagctcactgcagccttgaactcctaggttgaagtggtcttcctgccacagcatcccaagtagttgggactatagatgcgcaccaccatgccctgatgattaattttttttttttttttttttgtagaaataaggtcccgctatgttgaccaaacgctttgagccattatttttggtgccaagcactgagttaggtttaagaaatacggagatcagagacttgccttcaaagtgatccctatagtttatgtgtttaaataaagcagctttggagtgtttttccctcagctttcctctgggaagctccaagtttggtgctttgctgtgaagcccaaagatttcattttcttttttctcaatcccctgttttgtggtggaggagaaggccaggagccctcttgttgagcaaacctgcaaacctaagccaatttatataaggctgttcttttttcagcatcccctcggaacgaaaagatgggggttatgatgtttcccagtgatgcctttagatgcatgatggtgcctggacagatcataagctttataagggtcctgatgtcctgtttgttttagcaatctgccctcatgcaataggaggcattcagcagacaataactggattgaggtggttgagatattactattttaagttatttgtgtctctgtgtgtgtgagtagatgtatgttgggttggcttaatctaaaatgtaaacaaaatttgtctacttttgtggtttgtttttagggatgctaggaagatctcgtccctagaaatatatcccattacctagctcagtgtgctctaatttttaccattagagatgcaattctttattgtaagggtgaatatctgtagtcccgcacatgttagtatgaattagtcagtggtctttccttttagctctagaagaaattacagtagtaagggggcctggagctctagaagagagcaaagggcagagaaagcaacagcaaagctcaggcaccaaaggcaaactgctgcttttgtaatttggctgagagaggaccttagtcctgtcttaagaagattgaaagagcttcagagaccaagtatctgtttctccctgagaactaattaccaagtaccaagagcacagacgacactgtgctggtgcacaggactttgcatgctattgttactcaggctgtgggtcctagtcttgtgcaggcatgatggctttatcaatcatcatagtgagaatgagtcatgagggatccacacttggacagaagggcttagccctgaaatccctctccatagcttgcactgatagtgttctcttttaacgggagagaccatgttttgcaatgaaaatacatctgcaggctttgggtggagctagccagacctgggtttgatcctagctaaggaactttatagctttgtgatcttgactgaaagatttaatctctctgatcaccagagataaaattaacactgacctcctacatgtgatgggagtattaaatgagatgaagtatgtgcagggcctgttattaacttattactaatacatctaacaagttaggtatctctttttttaaaaaaccattttttattgcagttaattaaaaaaaatctaccctttaatgtatttggtttagaaattatttccccagaacagaatgggtagagtgtaaattcaagagtcagtaaagcacatcaagaaagagaagggctcccagagggggctgttccctgccgcttgcctttcacgtggctctcctgcctggtgactgtcggctgggcagggggccgggctgctcccagggaagctgtgctgctgcattgttcttggcacttatgccagccattcagggctctcaaaaaattggcttagaaaatagtttgaaagttattacttgggattcaggaaactccaggtggcttttgagagctgcccccaaatgcagccggagatgcgtcctcagctgttcactttcaggactttcattatttttcatgtttatttcgggctggagccagagctgcggtattcatgagctctcaccgtctgtttttttttttttttttttttaatcaatccctttgtttctttaggagagaaagaagcttgctccccaatcccctctgccccaccatagggttcaaggaaactggccctcataattgtaaattacctatgaaaaagacagagcccttggctcccttcctggcgaaagcttcaagatcagcagtgatagcggaaattaatgaaagcggctgctgagcccctggcctgttggtggctgctgagatgaaaaggcagcaattgaagtcggctttggggatgagcattccgataaggatttttgtttgggatacggttatgacctgtagcatgggctccagccaggacttaggtttcttggaaccggttctgatttgctcactaacaacagtctgcttttctttcaaaatataacctctttccctctaatctgaccacctcatcccccaagaaaagaaatgcagccctccaaacacaatacagtagtagcccaaggtgacgccaaatgtctgaatctctccctcttttctttttcttcttctttttagtagcagaatgaggctcagttgaactcattttctctttcatctcggctcatcccccttgggctggtgttaaacagctgtcatacaagggctgcccaggaatccagttatgaaacaaaccagccagccttcttaattgtcctcctgcgactggactaaatttgtcatcctaattcttgagcacttgagttcctgggctgcaggcttgagtgtcattcctgaacttggccagttgtttgccctccgtgagaccctcttgtaaactgattagatggcactcaggaggccacggcggggcgggttgaggggggcaggactgagcttgttataaacggagatttcttatttaggtggaaggcaaagttttctccttactgttccactgtcttcctgagagaaattaacactcaagtggaaagaacacattccacatggtacacggacacatgtgttttgttgcacatgagggctgggtttttgactgtaagtgacacttcattctgtcaagatttagaagtatattttaaattgacatcaatgaatttaaccgtcatggttttggatattattgtcagcatcccccaacatctatggcattatagtaattttttgcagtatattgtactaaatggtttttctgttgtctttttgggaagtgagtccttctgaaatctgtttcctttatattctcagcaggtgaaccttttcttttcttttcaaaatacttcaatctcagagtctttctttgacttcttcttttctttcaaaggcatgttttctttttttttttttattattattatacttaaagttttcgggtacatgtgcacaatgtgcaggttagttacatatgtatacatgtgccatgctggtgtgctgcacccattaactcgtcatttagcattaggtttatctcctaatgccatccctcccccttcccccaccccacaacagtccccagagtgtgatgttccccttcctgtgtccatgtgttctcattgttcattcccatctatgactgagaacatgcagtgtttggttttttgtccttgcgatagtttactgagaatgatgatttccaatttcatccatgtccctacaaaggacatgaactcatcttttttatggctgcatagtattccatggtgtatatgtgccacattttcttaatccagtctatccctgttggacatttgggttggttccaagtctttgctattgtgaatagtgccgcaataaacataagtgtgcatgtgtctttatagcagcatgatttatagtcctttgggtatatacccagtaatgggatggctgggtcaaatggtatttctagttctagatccctgaggaatcgccacactgacttccacaatggttgaactagtttacagtcccaccaacagtgtcaaagtgttcctatttctccacatcctctccagcacctgttgtttcctgactttttactgatggccattctaactggtgtgagatggtatctcattgtggttttgatttgcatttctctgatggccagtgatggtgagcattttttcatgtgtcttttggctgcataaatgtcttcttttgagaagtgtctgttcatatcctttgcccactttttgatggggttgtttgcttttttcttgtaaatttgagttcattgtagattctggatattagccctttgtcagatgagtaggttgcgaaaattttctcccattttgtgggttgcctgttcactctgatggtagtttcttttgctgtgcagaagctcttgagtttaattagatcccatttgtcaattttgtcttttgttgccattgcttttggtgttttagacatgaagtccttgcccacgcctatgtcctgaatggtaatgcctaggttttcttctagggtttttatggttttaggtctaacgtttaagtctttaatccatcttgaattgatttttgtataaggtgtaaggaagggatccagtttcagctttctacatatggctagccaattttcccagcaccatttattaaatagggaatcctttccccattgcttgtttttctcaagtttgtcaaagatcagatagttgtagatatgcggcgttatttctgagcgctctgttctgttccattgatctataccagtaccatgctgttttggttactgtagccttgtagtatagtgtgaagtcaggtagcctgatgtgaccggctttgttcttttggcttaggattgacttggtgatgcgggctcttttttggttccatataaactttaaagtaatttttttccctttcttacttgatagttcagattttaaatgtgatcattttttctttgttcacaactcacccacatatccatgacattttatatcgatccagccgaggcactttccagaaacaggttcttgattcatcttgaaggagcagtttatggatgtagcctcttagaaatacctggtaatatcagaagatcctggaagtaaatgaaccagtggtcttctcccatttgccgtttctttctttatagttggcatatcgtctttaggggactgtggcagaattgcagtatctgtagctgctttgggacagatctttatgggttccgtgttccctcctggcatctcaaggcagaagaatggacgcacgggctttgaggcagacacgtgtgactgtatatagaaggaaaccaacagaccttgggaaatgaaatggctttcaggtcacagacaaagttgggttcatatggagaacaattcattgttgagaactgatagcaacttaatattttcccttgagacgcaagggcttcccagtactcaaggtctgaagatataggagacattccttgacaatatacagattccctgccaatacccacaggtgagtcagctaactctcttaatcctacctcctcccaactgtggcagctggaaggaaagccagaggaacccaggacatgagctgcagagatgaatgtttcaaggttttctctggtggtctctttgaggcatttgtgcatctgatgctctgcaagtcattagaaaacacaaggaagccattggctatggctggatccagactcaaacatacacaaacctcagcctccagcagcgcctgcccagcacaggtatcatcacttttgtctctgctgccagctgcctcagggccatgctgatctggactgtctgtgtctgagcgatgtcaagacactggagacaaatgaaaagaccatcttggttcactctctccaaatgccggagacaagagaaacagaagttgtatttgcagaatagtaaatagggatcttcaaaataggtcaggcaaatgggtcaatttctttctgagtttttttctgctattgtcacatagaagttcaccacctcagggcaaattcaggcctgtgttcatgactgctccagctctctgataagtctgaccatgttgcccagtgccaggttctcctgaatctgtttctcccaggagtactgaaagcactcgggagaggtgataaccctgttatctgtcttcatcaccaacgagtcaagacactttagacagaggccatgtctacaactcatagagtagggttcttcacagtagtccctgcaacagggggaggtcaacagggctttctggagttcagtctcagatgctcttaaattgaagtcctctcctcaggcttctggctctgaagatccccagcatgtctgaaggatctggagtcactgctgtgcttttagtggggcaagtgaaatcacacgtgtccccacatccttctatacccatttcacctactcagtcatttgattggatttccattagaaagccaagcaaaataagacaaggaattcacccacctttgtaggatgggaggatttctgggtgctaattttcaggttctgtgtgtattcaaccaccaaacagaattgtacttggtacctcttttgtgtagtaagtatgcaaggagatatggtatgtttaatggtgaacaggaaagacctggaccacaaaatattagctggtctttccttttacaaatgggaagaattttctttattttgttcatagaacgtatttcttggcatgattaaaacatgcaaaaaggtatgcatttacaattttgcagtgcgtactaacaaaggcaaactcagtgatatttttattacataaaactgaaacagtcaaaattaattatttatgacaaattccttcaaaaaatctgcctgtactgtgtagtcctagaaatttgtggccccctttctcctcactcatgtactaccgagttaaataattaatttgcagttttgtatcccttgataaaatgaaggcttctcaaaagtaggaagttatctggatcagattgtgatcaaaatatgtagaatacatgtgagtctctgctgtcgtctcacttactcctccttctgtgtactgtttcgacgcacctcctctgggaagtcttatctgatcttccaggttaaggatccccttgtttatgttctcatagcctggctttgtccttcacagcacatattaaattgttgctttcttagtgtctatcttccagataacctccataatggcatgaactccttgtttgcttctcaggaagggattccagcttcagggtgtcacctaatgcattgctcaatgaaaggttaatggattaacattcattgcacagaggttttataaaagacacttatttttttgtttgtttgtttccttgcttctgtgtgtcaaggcaaggaaagtggtttgtatgtatgtatggagaaataataatgtagaaggggtgagattctggggatttgagggcttaattttcttctaggatcttatctattagttggccttattaggttaacataaagttaatctttccattagcaatcattgtagcttctcatcttggaaatctcagttttaaagagtaaattaaggcctttcctctcccttttattattattattattattttggagacagggtctccctctgtcacccaggctagaatgcaatggtcctatcatagctcattgtaaccttgaactcttgggctcaagggattctcccacatcagcctcccaagtagctgatactacaggtgcattccactacacctggataatttaaattttttttttttttttttttttgccagggtcttgctatgttgcccaggttgttctcaaactcttggccttaatcagtcctcctgcctcagcttcccagagtactgggattataggcacaagccaccagggacaatcagaccttttctttttaatcaccagaaggcaatgctgacatttgttgcccaaccatcataacagcacacttggccgttgtggtcctggcaggcgtatctgtctcattagatattcacagttactcggagcagaggcctccaagaactgatgtgcatttcttgggtttatcctgtatggagtttgtcaagctgcttgaatctttagggttgtgtcttttgtcaaatttggggaaatattagttattgtttcttcactctactttctttttctctccttctggaaatcctaggacataaatgttaaagctttgtgtagttccctgatgctcttttttttttcagtccattttctctctgttgctcagaaaaataatttctatttttctgtcttcaagtttattgtttctttcctctttcctttccattctgggttttttttttttttttttttttttttttttttgcctagcctttgagtttttaattttggttattttatttttcagttctaaaattgccagatggttctttttttatatctcccatttctttgctaagactttctattttttcatgtgtttcaagcgtatgcataattgctcattgagacatttttatgacggctactttaaactccttatcagaaaattccaacatctgtatcctctcagtgttggcacgtattgtcttttctcactcaagttgggattttccttgttcttggtatcagtgtttttttaaaaaattgtatcctggacatttgggtactgtatgactctggatcttattttgaccttctgttttagcaggctttctcttatatcatgatagtggtgggggacaggggaggggaggtgctaccttgttactgccaggtgagggtggaagttagtttagattgacaccctaagaggttccttgctactgctggacagtggcacatgcagaaaggctgaaaccatcatctcttgaagtttcccagaaaattgtttttgttcatctccttagcagaaaagatgtgcaaagttttgcatttgtaatccatttggtgctgggtgacaagtcataaccttagtagtgtgctgtgtggaagccagcggggcagcatagaagggggtctctgagaagtgtgaccagcctcctgaatcacagtgtttaaggatctatggaaaagtaaggccctgtttgtcctgacagtgacctctaaggagcttgggtagaggaggataccagtaggtagtggccacactcattgtccagtgggtagtggtaacatgactccaggaatttgactcagtttgatgcaggcccaaatttgggcctcagtcaacaacattgggctgcagaccttggacagctgggcctggggcctcaagaggtattaacatcagagccaggtctgggccccatccagcagacctctggacactaaaaataagggcaaacatcttgacaactgaaccagtcaaagagtaagtgtagcacagtaagcgcagggagactcagggcagtcagtggtcctaaatctattggatggaacagggctccatgttccattggttggaactgcactgccatgattgacttagggctgagactccgtaagactggccacaaagagaccaggagcacttattattattattgtttattacttagttcacattctaggaatgccctgtgtgtaagaagcttggatataaataagcattaataattcttgaaatcagaatggaaagcattttatatgcattaccttttaaaaaatttcataataatcctgtggggtggatagaacatgtattgttattccatttcctgaggaaaaatctggagctcaaagagatgaaaatgcactatacaagtgagttagggaacttggctcttcagactctaaagtctagggctgtagagggatatgctgagtgtcagtctctgcagcttccagtaagtgccaggtgtttgcataactcagtctttgcatctgtagactagagcaaccatgacctagaggactatctctgccatagcggggtgaagttgcacctagttttacatgtctcagaaaactcactgatgctcctacaagctgctaacaatcattcaggaaacatttattaagcattcactgtacgctaataactgatgttgggaatgcaaaagtcttctttgtccacatggtttctcggctcaatggtctcatggtccagtgcagggaggccaagtttaatgcgttcctaatgtagtagaaggcagtgggggagatgtgccttgggaggcattcaccttctgctagggttcctggaccagatggataatcttgggggtaaaggaggtgaacttctgggtcccttttaaccatgcctaagaagttcccttctattagtgggtgttactgacccactctcaggacagcctgtggactgagttcttgtctccatattctcccctaagccccctgtgaacctgtacgtgctgctgtgagatactaggctggagctggaaacacaggaatccgccttgtctgtaccgatgtggatatgaggacttggaagcgaggttaggaacaggaaattaaaagcatccttttattcaggcatccgcttaaaggctaaagctacaataaaaaggcttcagaatgggcctccctaaatcttcattcattaataacgattatgatcattattctaacaacaataataatactaaactctgataatgatctttttgcatttacccagttcatcacctcatttgatcttcacaacactgtgagatggacattatcatctccatattgcagatgaagaaatcaacccttaaaaactcggtgggcttgcccatggtggctggcaggagaatgatggagcagacttctcattctagagctcttctcctttgcctctgtcatcatcttccctttgaacccagtcctctaaaacagctgcttaaaaaacaataatgaagaacaaagaactgacaatgaatagactgtcagaagacacctttgttctgccttccctcccctatggtgctctgggaacttttgacatgctgggcctccttgatttataccagtgaatctgttgaatgagatttccagttgtaatagtaatttttctattataataatggtgattattattaattataatgctatttttattaaagcacaggccatatgtcagcaatagaaaagcatttgatttttcttgtataatcctcacaacaatcctatggagaacctgttattatctccactgttacaatgaaggatctaaaggttatagacatttgaaacttgcttaaaacaaaatagttaataaggggcagaaccagagtttgaaattaggtctgtctgtttctaaagcccatgcttttaaccccaaaacctaatttcctcccacactgatgctaggtttgcagaatctggactccgcctccatacccagaatgtgtcacgaacactaagaagtaaaggacatgctgaatcttctcccttcagtttccctcttgcctttgcttctctgcaggttgctggttgggtgttgtatgcctgggacccattttaagtctgtgctgtctaagatatgagtggtgtattaaaagtgaagacacgttgtttgcttcacgggcattaatcaatggcaaattagaatgcaattgatatatgcataagacatgcacattaattccaaatgtgtttatcgtaattagtgctgttacaaagaataccaaaggaatcagggaatgattagctacacttagtatttgttatggtttgtttaaaaaagttaaacataacaattagttgaggtttgaggagcgatgttccatttgcatggtgaacgtggctacaagccttgggtctttgcgagtttgaaggtttgaagggggtttcctactcaagattttaccaaaaaaactgagttaatgaggctatcatcctcaattaatgctgtggttttcctttcttaatcatttgtatcttacagctgttttctactgtcacatctacatcaaaaagcctatcaattgagaaagatgaacagaggggatagaaaagtagaccaaaacatctaaaaggatctattagtatatacttatatagaagtatacttttgaagaaactagcaagttatggctgacatacaaaaagcggtacatattttaagtatgtgaaatatttaatgacaagttaggaaatagtgtacacccttgaaaccatcaccataatctatgctataaacctatccagcacctccgagagtttcctcctgccctttttattagttattattattttgtaatgagaactcttaacacaagatctgccctcttagcagatgtttaagtatataatagagaattgttgaccacaggcactatgctgcgctgtccatctctaggatttattcatcttatatcactgaaacgttgtatcctttgactgatacctcccacttgccccctcatcccagcccccagacaccagcatttcactctctgcttttataagtttgactattttaggttcattatataaatgagatcatgtagtatttgtccttctgtgtctggcttatttcactcagcataatgtcctccaggttcttgtatgttgtcacaaatggcagggtttcctcttttttagggctgaataatactccattggatgcatataccacattttctttatccattcagccatgggtggacacttaggttgcatccatatcaaaaggataagtacatacttatttgggggaagaaattatgacccaatttattttgaaggtggtgttttaattgacaaataataattgtatatatttatgggtatgatgtgttgttttgataactgttttcttttttttttttttttaaggtggagtctcgctctgtcacccaggttggagtgcagtggtgcgatctcggctcactgcaagctccgcctcccaggttcacgccattctcctgcctcagcctccccagtagctgggactacaggtgcccgccactacgcctggctaattttttgtatttttagtagagacggggtttcaccatgttagccaggatggtctcgatctcctgacctcgtgatccgcccgccttggcctcccagagtgctgggattacaggcgtgagccaccgcaccagcgataaatgttttcaatgtgaagtgattaaataaggctaatgaacaaatccatcatctcacatacttaccattttttgtggtaaaagcatttgaaatctattttatcaattttgaaatatacaatgcattattatttattatagtcaccattctgtataaaaatcactaaggcttattcctccagtctagctgaaactttgtaccctttgatcaccatctctcctttcctcatccacccgctcccccaggttctgtaaccctcattctactctctgtttctatgagctcaacttttttagagtccacgtaaaagtgagataatgtgatatttgtctttctgtgcctggcttatttcacttagcataatgtccttcaggctcaaggatcagtatatacttttaaaggacatatgctgcattagccaggggtaggatattcatatgtattgacattgactatgtcctggcatctaatttatgtgatcttcatttaatcttcagaatgactatgagaaacaagtattaaaatgagaagactgaggctcagagaggtttatttgctcagttacacaactactgggttgagggcagggattcaactccaagtctgtgtgaattcacgttcatgcttgctctactaagggtggctcacttccttcaagtggctgaatgcctagactaatgatgccaattccagagaacgttggtccattgttctgtggtcagtctgaacctcccccatctggctggtcacctccaggatggatggaaaataacatggtttagcacaaacccaactctgctgatgaaccagctgctcaaagtgtttgtcctaccatgatttctgttttttgaggatgggcttctagggaagtaatcagtcacattaaggagtccattcaacaaacatttgttgagcatattgggaatgctgaacaacatgggtagaatgagggtctatccatgttgagaatgcttctcagctctagtgaggtagatgaacagtacagtcacccacatgaattcttataattaaaggggagtggatagacatactgatacttccaatacgctgagaaatctatgacagatgcatggagttcctggagagttaatgagaggctaatctaacctgtagattgcaaggaggcaagaaatgcttcccatatgtggtgtataggttgaattttgattatcgaatgcctgcttgatactgtgctatgctctgtgcattatcctataactctggggagtcatgttctttaagagagacactgctcggaccattctcagcacctagcacagttcctggcatgtaggaggcatcagtagaaaatatgtaacaactcctggaaggcagtctcctgcctctgccttagcacttccacactgagcatgtcagctggaacaggagaccagctgtgcaccttgaacagcactgggtttaaagcctggatctaaccccttgctagccatgaaaccttgggaaagttcttcctttattccctgagtttcttcatctttaagtgggaataatagtagcccaacatgacatggttgttgtgaggattaaatgagttaatgcgtgtaaatgcccttagagcagtagctagcatgtagtaagcacaataaccaatattggctaagtttgtcatgaggtctcaatgaatcttctcagaaaagtctctgttttggcaaattctggctttcctctgatgtcatgtggtctgaatctaaaatccattctctttttatagatctggatgatatattttgatggcatgattctataatctctttcttagagaactttactgagtcccgttcagtttgttctagcaaataataaactattagatcttattttggttatttatatcagccacagcagttgtagcaatggacagaaccagcccgataaaatcagtattattgttttccattattatcagtatatcagttcagtttattttcctttcttttaaaattaaaagcaatgggaaccgtctggaatccacttaaggaagaaaagaaaatttaatggaaagatactgtaggtatttcaggaaaaaactgagcctcaaaatggtagggatcaggaaaaatccaggcctcagggataggattctctagactcctgctgggtgcagtggctcacacctgtaatcccagcactttgggaggccagggaaggtggatcatctgaggtcaggagtttgaaaccagcctggccaacttggtgaaaccccgtctctactaaaaatacaaaaatttgctgggtgtggtggcgggtgcctgtaatcccagctacttgggaggctgaggcaggggaattgcttgaacccatgaggcagaggttgcagtgagctgagatcgtgccattgcactccagcctgggcaagggagcaagactccatctgtgaaaaaataaaaagaattctttagattctccttccgggtctctaccaatagtgtaactaggtttccagcagattcccagaagagggaatccagttttcccagctgtggtcaggtgtccaccattaagccaatctgctgagaccaatgggcagagtcctgaagcaggagcatggctatgagaaggtcaccactccatggggggcaggcaattccaagggaaggggcttttgggtaacctgcttcatgtctactgcagttaatttttgtgtagcatggagagttgtgattttacttcttgttttccaactctgaggattaatcaagtgtggttactgagcagtgaccatgtaccttgttctgtgcaaagtatagggtgtgtgtgtgtgtgtgtgtgtgtgtgtgtgtgtgtgtgtgtaatggttacaacgaagcaatttgaaggatcttgtccttagaagtgcaagcccagaaccagaccaaggaatgctttatcactttgaacatgattgtgacttctgcatcagctgttttcctagttccttttctttttaaatctttatgtcttcttcatatttcatgcttcttaaaaattggggcatctttggctcaagtgttcaatataaagggtggattttaaagggaagcatgtaaaatactatcaagtttagtgcgttcttattgtatgtcaataactgtacaaattcattattttctcattgaatattcccagccccctcagcagaggcactaggataatccatatcccacaaatgagggagatgggccttgaaaagaggaggtaacttcctcaaggttacaccactagtatgaactgaacaaaagcttctgaattcaactttgctgactccaaagccagtgcaatggacagggccagtcatgtcacttttcattttgtttagtaaattatttttcatattttgcatacatttcatatttttcattttatttatttgatttcctcatggaaagatttttattttttaaagccgtgatctcactggtatttcctgagtctgtactatttaattatataatagattccttgcaaaaacaatgaaaatgagcattattctttgaaaaccaacaaatgataaaaattaaattattaaatggctatataactaattttttgatcagcatcagacacattttaaaagcaatttgtttgaaaacatgtgcaaagacaaggtgtgtgcagtatcagttagtgggtagtactaacttatattacatactatgatgtttgccatgatcctggaatggtgggcttgaaaatgacccagggaaagattatagaaggggctactaagataatgaagaggaggtgatgatcactgggactgcaatgagggcttggtgcaagcaattcatgctagcataaatcttactgctttcgtaagggtcacagacttattaggtagaaaaaaaaataagcagaatggacctcggcaacatatctgaacaacttccttgtggtatctttgtggccaatatggaatgtatttgtatgtaaggaaaactgatgggttaataattggccaaatgattatactcaaagtatactgaccagtggttgaaagttaacctgaagatagtgtcccaagtagccaactttagggccctgtccttggtcctgccctccagtctacctaagagatgcaggcttcacttttctcaggttggtgaagatactgatggcaaattgtacccagtgcacaaataatacgaagacaggatgggacagtgaatactaagacagaaacaggatataaaatgatatttatagactagagatctgggccaagtctaacagaacaaaatgtagcagggataaatgtaaagttctacaaatcccaaaattaaactgcacaaaataggatgaggtagatgtttcagagaattagtagcatgagtaaaatattaaatagcttgggaaccagtaagctcaaggttcactatgagtcaattctgtgatacaataagcaaaaaaactcacaaagccttaatctattttaatagacctatattctagaatgagaatggggataatttcttggaactatgcatttcttagttcggaatatcgtgtctataatattttaatttagaataatttttctgccttggtgggtacataatgagatatggacaaattggaagacatacaagagagggagaagcacacagcaagaaagagagggcaaaaaagagacattatagcagcctttagatgcaggaaggggtgtcaagtacaggagatattagtattgtttaatgcagtatgagattgtggaattggtgctaatctgtagcagccacagagagataaatttggggtcaaaataaggaatacatttctaataggaatgcctggttataagttttcctgggaggtactggactctctcttatgggagattaaaaatcctgggttggaatgtaatgtaggattggtctcaaatggcattactacagattataggtgtgtcctgaaatggggatactctaaacattttgagcagatgagtgacaggattctgaccatcctgcaagagatgggccagcctgaagtcagggagactagttaggaggcaattgctctcatccagatgaaacaaaacttgattggaggtaagggttaagtagacactggagagtttaggataggtccattgctccaaagcccttgcaaggcacggtgagtgaatgagagatagctaaagcttgctgtgcatctggggcaatcatttaatgtctggggtctgtattcactcagctgtgaaatgagaggctaaaatcaggatccctttcattcatgacattctgtgatgaaaacaagctataataatcccatcgcagggaaggtgcatttatagctctgtgtctgctcacttaagtagtctgatatgaggagggaaatggaggtggctcctacccagagatactctcccacaatgaccttgtactgtggctgggattttgtcactggggtttttattcaattaagttcttatatgctcacttaaaaaatgtaaatgctaataggaagcatatatatatatatatatatatatatatatatatatatatatataatagtttagcagcaggaatgaggttttctgattagttgcctttaaaagctctgttaagcacagtcttaaaactttttttttttgaggcagagtcttgctttgtcacccaggctggggtgcagtggtgcgatctcagctcactgtaacctccgcctcccaggtttaagtgattctcctgcctcagcctccccagtagctgggattacaagtgcctgccaccatgctgtctattttttttgtatttttagtagagatggggtttcaccacgttggccaggctggtcttgaactcctggcctcaagtgattcgcctgcctcagcctcccaaagtgctaggattacaggcatgagccaccgcacctggctaaagcattatttttttgtgataaggaaaagagagagatcattttggagcatgggacactgcttggattgcaaagccaagtaaggtgccacagttggcaaacttggcaagggaggggaatcaccactgagggtaagccttgcttgtaaaagagtggaaggacttcaagggcaaatttaagtcacttcacagttttactgtgggctgggccagctcagaggctggaccacagatatatttagcctccctcttccatttatttgagaagacgatcttagggatgttaggcgtgtcccattgtgattgttgttacatctgtgcagtgattaaaatataacttcctttcatcagcgcttgattcctttaaatggaattcattactctcatctgaacattttatgttaaaaacaaaagatcatagagcagtctgaggaggtatataataattaagttactgttgaggttctgatagttactatcaacttaaaatagagagtttaagtattttctatatatcctaaatgcctgtagacagatttttatcgttggttattcaacaaccttggaaagggtttgttggaattcatggggcttttgaagaaaaaccaaaccaagccaaccaaccaaccaaccaaacaaacaaacaaatgaacaaatggacaaacaaactttcatggaaactgggactttggcttcaaaagtaattttgaactaaactcttctagtaatttatcactgaagtaggagtatgttcactctattgactgaccttttaattaaatgttgtacctggctagctatattttaagaatttggcattgactttggacaaccatgggtaatctatccaaatgagatttacttgggtcttccccacagaagaaggtttagggcaccttctaatttgttaaattatgagtaaggaatccatttgatgggtggaaccagggccaccttcactgtttgagaaaggttaagtgatatttaccagcacattttcttgaatgttcgtgtcaagaaatataaaaggaaaagtgatctacattcatgtagaatgattgggccaggttatgtcaagaggagaatgaatacactaaagacccgaatgaaagtttcccttaaggctggattctgaaagatgcactgaatataaaatgtttgaataaaggaagaacaggaagagtgttaagtatttactgctagcaacacttagcttttaatcaagagctcttttcctaatactatacgaatgattaactttgataatagaagtgtaaggatcctaatttgtgactttgttgatggtttttccctcctttctaaacgtagttttaaaatacactaactttcattaccttatagtaggctttttcaaaggacttccttatcctcaatcttatttactagtgtgacattgtccttggggtttatgttatggcaccatgttatgaatgaggcagcattattgtgacattcttcagagatcaatgaccaaaaagtccaaggctgacctatagctacaagaattttgggctatcattatgctgaccatattttcagaagcctcaaatgtactatttattttcctagttgagaatgtatatatctggaaggtttaaatcatagttacatcctgtaaagagtcttaatttggtagacctaatataatttagtgaaatttgcactgggccaggcagtctgagaggtagagttcaggggccctatttgggctggtctagttactaaaattctgctatgtgctaggcactgcgctactaattttgtgaatgtttggtgcttaaatcaaggttaagcagcttacccgtttgtgataagtgacagggctgggattttatcccaggcctgcctgtgtcaaaagcacatgctgtttccatcacactgagtttctctgctctctaccagtttgtcatatgggtctgctacatcaaaatcatccggggcccctgttaaacatcagattgtcagaccccacgcagggcctccagaatctctccagctgtagctagccagctctccaggtgattggattgtatggccaggtttgggaatcatgggcacctttgagcatcattgcttgcccttatactgtaacctttagagggcaacacttttgctgcatacctataggtatggcagatgttagacacaaagtccagaatagggggggaaaaactttacccccctggcgtttttggttttaggtgctattaagggagaagttgagagagacatacattgaaagatagataagcttccctgagacttggagttgagagcagtgtttgggcttggggccttgcttcctgttctaggacatggaaatttacttaggaaatgattctcatcaagcttgtttgtaacttgggatattcatcaataaatgaaagctgattatagaaatcagtccctgctggggccctgctaggctacgccctgacctctgtgcccatatattgacatcttgtttacttgcatctataaagatttattccagtcattagaggatggcaatttgaaccctagaattacaccctattcctgccagctgatttatgtgttttctccttttcaccaagcacagaaataatccagatggagtcagggtgggttggagggggatgccaaagaagaaattaaattagaaaaggtgcaattgaaataacccagctaatcttagcagagctctgtggctaatgcattaccggtgaattccttctggtcgactgaaaatagtattaatagtgtataaatatatgtgtgttagtttgtaatagggaggagaggaggcaggcagaggatagattttgtttggaattattgactaacagttgaaacctgaccaatgatttggtacattcattcattcctttattcaatgattcatacagctgttctgcaaggagatattcattcattcaatcattcatacattcattccacaaaaacatattcagtcactcattcatacattcattttgcagggagatataactgagcactcactatgtacctgggacttatccatatgtgaattttcttgagaagagaacttgggacttaacattaaggaatttaaaatttagatcagtaataagattgcatgagagttgaataaggacataagaattgaacaggaaatatcataagagacaaactaagtgttgcagaatgaaagtggcagagtagttaaggaaaacctagatgaaaagaataatcctgaagaatttaggattcaatttgatacttgagtttctaagatgggatagatttacataggagtgaggacattccaggtggggagaatggtgtgagcaaaaacctagaagcagaggtatgctgggggcattgacattcaggccagccaagttttgatcacagggatcatgtttgtgaggcagaagagcaatatgagtttcatttgatgatgtagaataataccatttttgcctttcctcatcacagttatcacacagaatcataatgatcaatgttcctgtctgttttctccattagattgaaagtccttaagatcaaggactgagtatttttttgtgggggcttttaagtacccttaattacacaaagctgtgcacccagttattgagtggagactgactagggacatgtctggaatgaggcagtggggagccagcccctgcttccctttcttgctgcctgttacatgttgaacattagccaaagtggttttctcatttataaaatcattaagttattatgtggctcctcatccatgtggttagaggaagtcgaggtcactctgagcctcgcaacactattattagagttaggccatcagtgaactgtgagtaagaggatgcatggtggtgaactaatggacagctgtttaccaaggatttacttctctccacacctatgttaaatactatgggggcatataaaaagtgcatataggatcacataagagcactgtccttcagaagtatacagcatactggactgatgaggttcctctacacgcaatagaaataaaagaatgtctgaatagtccatggaacctgccttggtttatttttatctataaagttggactggatgatctctaaggatcctttgagtttgaagctgatggagagctcaaagagttcagcaggggtaaataactaggaagggcaggcaatgcttattcagcaccttcttcataaacagagtttgtaggcagggtaagggtgggtgaaaggtggagctgggaatctatcagctggggtttgaatgggagtggagaaagcatcccaagagtggagaaagccacagcaaggggcagaacctggaagagcatgcagaatggaggctgcctgtggcatccaggcgggcctcagatggcaccgatcctcagacagtggtcagggtaacactttcaagacagctcccttgtgagctttagtacctctctttagaagttgctggcagtgcattggctgggatcctgaaagttcatgctctgtgctagtgtatggggaacattctgatacttgggttagtgatttctgggactgaatattaaggacttgatcttctgtccgttccacctgctttcaggaccactggagatagtcccttggcttctactgaagctggaagatctgtgtccatgtacaagatcaacaaccattatctccttggacttctaactcactccagcattgaacagctgctgttttccaagttaagggtttttttttttttttttttttttttagccaattatagctcacaaaagtttgtgcttgctctgtccaggtgggtctgccagaggccccctgacccaaatgttctgtccccacatcatgtggcagcacaacccaattagaggtgaccagggcagctgtccacataattgtatgcagttaacatctaacccttggctttcttggcaaagcaaaggcattggccttttggcttctgctggtccggtcagcaattacccagttattaaaactaaataattgccattagctcttgtcctcagtgcatcctgagtctcactgcaggtggatcttcatctcatttgcaaagctctccaatgcaaggcaagggatacttgtccttcagacactaggcaggtacaacagcagagcagtctccctgtgtgccacagtttccagctgcttttgcgtttcgaggtgttactgtgaattttgcgcttctgccacagagccgatgccttgtgtgtctgtgtgcttgtgtattcagagggctgctgttttattgttgggttggggggattttcctttgctttttcttagctggatattgccttttggtggtggcttgaaattcagttcgggggtgtgaactttctcttcatttttttctccttttctttctttcgagttctcatttctgaagagatttctgttcttaaatcctagcattaaatggaggtgttttcattttctctgggagaagtttcacagcacaggtgtgtgcttgattctctacttgcggttccccactgccaccacccccccccccacacccgctgccttgatgctgatagtggctgtctaaagtacaaagggaaagttaagcttacaggttgtccttctctttgattgtattcttggctgtagcttctcagccctttgcaggaggaactcacatcagtctggaacataaaaacaggagaattttcagccctggaaataattgcttcttggagtagatcctttgggagcctccacactgaggaatgaagtttgactaagccccagcaatgaataggacttggatgaggagaaagggtctgagatctgtgtttcgaggcaaggaaaattctggcaggatccgtttgcatatatattgaggcctaattaggccctcggtgtgtttggaaactgctttgttgcggtgggtatgatattattccattttaagtacttccagagggcaatgatctttaactcagattcattcctggactttatttttgcaggggtgggtggagtgtaaccataatgagggttactgcattttgtctttatggctataatctcactcatttattcctttcttcaactatttgatacatgtttatcaagtggtcacccagtataaagtatggcacagccttgaaccatagattaaggtggtagggagagtctgtaggggccattgtctaacttctcattttgcagagggggaaactttgtctccatttttctcatctgtttagtgtctctccaagatcccgggcctttgaacattctagctttgggatgtctcctttcctggatgccctacacttcatcactttaaaatgacagctgagaccttgcagggtcattgaggttattaggtgatctagctggtactttgggatattgtggctcctcgccaagtaggaatgggctcacatctctcttttagtccttctcccaagcagcttctccagccccagagttcattctttctgtgctccctttttagcggccggacagggctgatatgcctccacagttctgagttgacccagacatgacttcactctgaagaagtagatcctgttagggaaaccggtttcaaacatgaggtcttgtatggcttgaattgtgtctccctagaatttacatgttgaaatcctaatccctggcacctgagaatgtgatcgtatttgggaatagggttgttgcagatgggattagttaagagaatgtcatgctggagtagggtgggccctgatccagtaggactgatgtccttataaaagggggaaatttggacacagacacatatagggaggatgccatgtgaacattaaggcagagatcagggtgatgcagctggaatgccagaggttgccatcaaacaactagaagctggccagaggctggaaaagataatttattaaaagataatcccttaaaaggaagcaactctgtccacaccttaatcttggacctcatcctccagaactgtgataagataaatatctgttgtttaggccacccaaactgagtggtactttgttacagtagtcttagcaaactcatacacagaggatttgagagtgttttctggaatctgcagagggccaaataatcccctggggaggggacatgactgaagagggacttgtctctctctcactgccattccaacagaacaggggattcttggataatattctgctgagattgcgtgaaggttactttagtatatagtttcagcatattgattatatgtgaccttttatctggaataccctctgactttttttgcccaagttttatttttctcaagtcactgtttcagatccggctcagtcctcacctccttgggatatctttttctacacccaggcttgggtaggtgttttctgctctcctttgctgtaacttacctcgttgtattctatttatgctgatttgctgattcaccaggtgttctgtcgaggatctgtcacggcctggtgatgtcctgttggttctgggtcagtggctgacacagaggaggtccctgtgcttgaggagcttgtacagaactggggtgaatggatggtaaacacgctagtggacagaataatttcagattctggaaggttctagagaaaaaacaaaacaaagtaatgtaccgaggggaagcaagggacagctagagatacggggcccaggggggcaatagctgagctgagatctgaaagaacaggagtcggtcatgcaaagatctgcaaaagaaaatcccaggtgggggaagagcaaagtgcaaaggcccagaggagggacctgtcctggtgtgttcaggatggagtgcttggagaatggcagctgagcaggagagtcagtggtgaggtggaagagattagcaggagtggggtcttgtgtgccttgtctcagggccagactgtgaacttagcatggaaaggattttgtaacttttgtcactacagcagctggcacacagtcagtgcttaatatatgtatgaataaccataaacacttgtatgtatacctgttaatcaaacattattaaacaatacctcatttatctaagaattgcttcttaggcaacctctgctagccagggtgcatcaagaagcaacaaagaaacaaacacaattcagagacaccaagtcaagatgtcaagagttttatgtactccaagttgaacatttttctcagagaatactgactttggtccttgttcagagcccagtaactatttctttatatactattatagtactttctttgcatattattgtaataactttgagtgttaattttctcagttcctagcaaatttagagcaagaagttatcattgggaaggaagtaggaattggaaaattgacatgagaggcagacactgtgatggcaatatgacgtgacgacagacagactgtagataggaaggaaacagctaggacttcagaaagctcatcagtatgagtctcttgattcagagacaagcagtcttaaatatcacagtaagcctgagacatcatgtatgatagcttggtaaaaatacatgctcttaacaatgaggattctgaagtactgcaggacagattacgtttttttttttttctccatttgttttatcgaagaaaacagggaagtagagaccattctagaataatttccatttgaaatggttaaaattcaaaaacagatctggtgcttaaggataagcttcatttatctggaaaatgtacttctatggaaatcctacctccttgaatgatgccaaataaatgaaaatgtgattgtttagccctttgatcttcaaaagccttagtacaagtggtagatgatttcctgtgacctcccaatcagaccaaggaattattatttctgttttttctccttcctaagagcaaggtagaaaatgacgagcaaacaatgacattactacagtggcattttaatgggtgttcagggaactaaaaagtcagcagaggcactgtatgaaatattcatgggtatttttctattttcttgcctcttctcgctccagatacaggaatgaagtgtatctggagagagaagatacataccatatctggagagagaagaggcaagaaaatagatacaggccaagtgttctgagtacaggaagcatgcagaaatggctcctgcaggcctatctttgacctttcatgggagggatagacaaggctcttccatcccccaccccaaaccttaatttttattttcctgaaatcttgtttttccagtaagctgagatccctctgcttcttgcagagtatccaagatcctgaatggatattgacagtctaatctccccttgggaattagaggaggattttgaagatgcaaatttccccactaaaggcttctgggagagggtgaatgtgatcaaacagattattgtcattgaagtgagaaaatgggggctggatggactggtctggggtacctcttaggtactgcctgtaaagcgttgacatgatacaaagtcaggagatccctaggaagcactttcagggttggggtggtatcttatcagcaagctgcagttgcaacattgcctgcttttgcctgttaatgattcttaaatataagcttggccactatatgggcctacactgcttgtgtgtgcttttctatggagacacattatgtgaaattctaaacttccgaaaccaaatttcatggaaacactcctctaccacaagaatccttctcttaagcacgtgcagtcccctcactgttcccacctctgaacatgaactcatgttttcacccaggtggatagccttcattctccacaggtcctattaattcttttggtccatctctggccccacctcctccagtaagtcctccctgttcaccccagtttagtgggatttcatctcctcatcttttgtggcacatgttgcctgaccatttgtggtgtgctggtcaatgttctctaggtggagggggagagtcctgatttgtagcatttaccaatttctgtagtgtaaatacttctgccatgggttatttcaagctaacaatgtggtgttagtgaatgcagagctgggaagcaggaaacgcatttgcttttctccaacgatgccagctggctgcggcatactactgcgtggagggccctggaactgtctttgcatgtctttcttatctcttcaaccaaaacctaagcctcagtgttgcttaactctgacttcacattagaaacgcttggtgatatggtttggctctgtgtccctgcccaaatctcatctcaaattgtaatcctaatgtgtcgagggaaggacctgatgggaggtgatcagattatgggggcagtttcccccatgctattctcatgatagtgagttttcgagagatgtgatggttttaaaagtgtggcacttccccttcacttgctcgctctcctggtgccatgtaagacatccttgcttctcctgtaccttccatcatgattgtaagtttcctgaggcttctctagccatgcggaactgagtcaatgaaatctactttctttataaattgcccagtctcaggtagtatctttatagcaatgtgaaaatagacaaatacacctgggagtctgtgacaaatactagtgctcagactccatccccagagtttctgagtcattggttgtggtagggacccaggcgtaagtatttttaagcagctttccagttgagtgtgatgtacagccagaagtgagaactgctgccttaaatgcagggaggatatttttttcagtgtttctcaaagtgtggtccctggcacgtgatagaaatgctaatttttggttcataccccaaacctgctgaatgagaaactcagggtgggagattagaccagtattctgcggtttaataagccctccaggtgattcttacgcatgctagatttgagaaccactgtcttctatcttctgaatacttatgaaaactaaagacagttataggcacacagctgtgcccaatcaacacttgttgattaaaatctatcagggagtacattttcatgaagcaagctattttttcctctttgtgagaagatttagtacagagtaccttaaaatagaggtttctttttgcagattgaatcatgtggcttacaaatagtcaaggatctaggatttactgttcattcagctatgtggaaacacacctattacattaaacaaagtagagtttattcattccacaaatatgtattgatagctgggaataatttgttattagtccatcttcccttatgatggccactctccatcagggcagaacaggcgtggacttctatgctccacttgttacttacaagctagatgatcttgtggccaacgcttctttagaccatattttttcaaagttattaattgatattgtttggctgtgtctccacccaaaatctcattttgaattgtaatccccataatcttcacatgtcaaggaaggtaattgagtcatgggggtggttccctgcatgctgttctcctaatagtaagtgagctctcatgaaatctgatggtttcataagtggttggtagttcctcctgcattcattctctctcctgccacctcgtgaggaaggtgccttgcttcccttttgccttccaccatgattgtaagtttcctgaggcctccccagccatgcagaactatgagtcaattaaacctttttttttttttttaatgaattaccagtggaaggtactggtaattcattaaaatgaaaatggactaatacattaattttacatagttttctgttttggcttgatgcaggatatctaaaaaacttataataaacttcataaataatgatgaaaatagtgatacattcttattacattcagagcaaaaaaacctgatacctttactacttctgctttttcaacagtagcagtgctatgtttatcaaactttaatgtgcatgtgaactcctggggatcctgttgaactgtagattctgatgaagcggtctgaggtggggcttcagattatgtatttctagccagcttccaggtgatgccaatgctgctggctcatagaccacatactgagtagtgaggctttgagattctagctgatgcaataaaataaggaaaaggaagaaagggtatgagaactgcaaaggaaaattatttgcaaaaatgattgcctacagaaaagatttacaaaccattaaaactaataagaattttatgctttacacattctgaggtgcccagctgcctggtgaggtagttgtagggtcaagtgatagtaatttgtaaatcataaagtattctagatgcttgagccaagaaggtaatgaagtattagcttctcaaagcatggttaattgcactacattgcctggtccatagtactggggtaatgtttttttcagaatgcttaactatggttcacccagcaggctctaggaatatatttttcacctgtttcctgtgtcatatgaatcagttccctaagtagattattccagttttcagagacagggagtttcttaaactccctttggcaacgtggtgaagtgaagaaatgacaaataggttttatctggtagtcaactctgatggattgtccaggatttctggagtctaaatgctgagattatttgtgcctgaaggcatgagtgctgtgatggatcagtgatgtctgccatcacagaggtcagggaaggtggtgggctggtccctagagctggactaacttaggtttgaatctctaccaacagccagagactcctattattaagctctgagacctctttttaggtctgtgggagtgccctatatttacgtttctttcctttggaccccgtggaacctagtcttttctctctaccttaaccatacttcctctgtcccctgtaatttctctctccttgagtgtgatgagacaggaagacagtttcctcaactctccttttcctcataagccccttgcccttatgggcctgactcccagtcttttgtagaaacaaacaaataccaacatgaagaaatgaggaggtttatggagccttacaaagctgtatggtcgtggagctagtctccaactcctaagtagtttaggggaatttctgagtccctgtctccttatctgtaaaatgggaggtaattattttgacctctcagggttgttgagagattaagtgatgtataacgtacatgaaaacacccagtggctggtacacagcaggtattcagtcactgttggttccttcttccagccagccccctgtgcactttgtcaacaaggctgacatagagtggacgttgtgactagatagctttcttggcatagaatctagatgaccttcctacatgccgttggatggggagaaataacaattatttttatttaataaaaactcccaaagctctcgcactatgccaggaatagttcaaagtgcattgtacatattagctcatttaatttttttaataactataaattgggtgctatttcacagatgaggaaactgagccaatgagaaattaagtgcagttcccaaggtcactcagctaataagtgtcagacctgggattcccacccagtgagtctggctccagggtctgtgtttttagctgccttactatgttcccacatctaggcctgtgtggggaacatcttggtatccacagctactaacttgccctttggggctagagaggttagggatttgctttgtttcttgggggattccttatcttctggactttcttgaaacaatacttcttcttgactctggcattattctgctgcattcagcagggttccccaaatgacccaggaaaaatgtcagcatgggagagaggggagttgggactaagtctgggacagacccagtgaatctgttaaatcagaccagagtgaactgccagtgtgaggccatggtctgactgctgtggtattcatgagcagagctgagaaagtgattgaggagagtcttggtggaacagagacagtcaccacatctgtatttgtctctttggccaatactgaagccttcactctcactcccacgtgtggggttgtgagaggaaccattgcatggagcaaatagtggcatctgtacttacctctgtccaggcacattgcattcacagtgcttgtttgcttgtctgtgtctcatgtgagctttgtgggaagaggaggggctgtgtctttgtgttcactcttgtatcgcaggcactggcacagtgcctagcacagagcagtaaatgaatcatgaatgaatgactcattcaagaaaaggccctccatactgctgactgttggaggatgctgtcctccttcacagtggccagttgagcattcacattgactttctgttgctgccactgtatgggccatgttggagacaggatttggaaaagtggtagatggaaggaaaagcagagagcacacactgggtccaagaagatgtggggccacggtacctctgaatgtgctgtgtgtggtggagtataattctccattgtaacttgaattgtttttgagaaaatggcaacttcctttctgtttccacccaaagggtgcatattggccttctgtgacatattgtcccattatcttctcccccatgactatgtggtttgatttaacataaatattatctgcattccagtattatagacaaggttcatttatccctgggtaatgatcttttaggtttctaatgtttcaggggttagaggaaggatgggaaaagtggttgttctcagattcacattccttcaatacttctggtgactagcctcacatccccaagttctccttgccttctgattaaatgtggttctgactctcaacatcttgttttcccagcttaagtgtaagccctctgagagctgattctgtgacttgtgctgacacagctcaggatttacatagagaaaatgatcagtaaatacttgagtagtgggcagtgtttgtccacttaatctgtgctgcagcaatggaaaaaatgaccttctcaagagggtggcaagtcctgctttgcaaatcactgagtaaaggaaaagccccgaggagccttgggactgctagcctacctgctcaataaagttccaccttaagatacaggctaagccttacctcctgggcctgcagtaacaacatattttgtaatgctgattccagaggacttgactgtggcaagcttgggtaagttaggtatcagtacatgtctttggaaattgcagccttctcccccttccccctttcccttcctctccctttcttgctccttgtttttattcctcccccttcccccttccccttttccttcccccttcccctcccacttccactccccgttccccttccccttctccactcccttccccttcccctcccacttgccttcctctccccctccgcctcccctcccctttcctctcctcgctctctttctgcttccccttccctttcccctttcccttccctcccttttcccttctcccttcccctccctcttcttcccccctctcctccccttcctcctactcttggtttttgataaatttatgagtctattagagcttgctggtagtataaaacatggtcaataggtgccactctttgaatagttttactgtaggcattgctcatcgtactccagtacagtgcatactaagggatctagaacccagatgtttaacagaataagcagaattggcacttgagtcaaatgttttctgaaaataaacctctaaatatattctccttgacctgggtcagaactgtagagcagagcttctaaaggtatggttcacaggagaactgccttagaattacaattacctgtcttacttgtttaaagtacagcttcttgagctccaaagtaaatgcacagaatctaactccatagggaaggcaccatgaatctgcactgttctgggagctccccaggtgattcttacatgcactgaagtttgagaatcatttagagcagtcacttttccttctttagagggagataagtaggcacattggattggaattcagtattaaggaggtgaacaacagatagtttttgagacatctgagagtttgttatactgaaaaaactgtgtcctactttttttttctaaattgtattttataacacaaagtatatttaaggagaagttgtggttgagacggggccagggagaatgggagaaaggaaacaaaaaattagataagcaaaaagatttttttctgtctattgttttcttcaatggtgtggtatccattaccatcaaacagagcacctgtaataagtcaccagggctcttgaagaaattggtgaagcttcattctcttgcagtgcttattagtgattcagtgtttgttcagcttctgctgatggagaattttctcttcagaagcttcacaagtcagaggttaccccttgctccctccaacccaattttctatgcaagaagcatctactttctctgcctaattagagacactcctcctcctgaatgacactggagtgacctgtcatggaggcaaaatgagagcacatagagagtgtgggtaagtatgtaaagacctgggcccagagggaggtacagagggcaggggcgaagtgtggagctggctatgcagaccgaatccaaatggccttagagagtagctccactttccagcaccctctctgcagaatattgacacaggcttcactttgtttcttccttgcttctgtgtctcccctctcccaccactctatcttccaaaccttccacctctcctgttttcatgagtggaagaagagagggtcaaagaactgccaacttacttgcatttaagaaagtggagccaacatgtagtgtgagaaatgtgtgggctcttcacaattgcacagggaagagcagagattcaggagaaatgacactccttccaggggctctagactgctgcatgttaggtccctaccagcccacagccagaggaaaagccagggtgaggccacttcacagggctggctctggaggccatcccagatgctgtgcccacggaggtgttgtgggctgtttctgtttctggaaacagtttcagaacctgagtatctgaggagatatccggaggaccacagtgaacattcctactccttgaatggaggctggccatggtccttgctgtggggaatgtgcctaggtttggggagatgcctgctgaggagcttgggacccaggtgtaagattcagcatctgatggaagaagctggcaagcattacctgcatcctgttctggtacctaaagggaggggggaattttcaagacttgttagagccaggggagatccaccaagaattaatgcccagcctccaggaagtctgagacatctgcttggagccagggacatttagctgctggtgtctagggtgatgctgtcaggagtgagcactgactctgaggcttaagtgtcccctctctgtgtgtgcgaccttgaataggactttccctgtatgtgtcagctccttatctgcaaaatgaagggtttaggcatgctgagccctaagtcttggcttagtcttataaattatacacttttgtcagatgacttttcttttgggggccatttgggataatgataatgatgactgttatggcagtgttggctgcccgagagcgaaacaggctccctatgaggtcatgagccctttgtcactaggggtattcatgtagtcatcaaagagcacttatgagtgatttcaagacaatttcatcaggaatatccaactattaaaaagttagattcctgggctgcaacctactctcaaggactccaattcggcaggcttgggatgggacctgggaatttacgtgaggaacaaatctggatcaatgtgctgctgtagggaggacatgtgagattgggagccctgtccactgtacccctcagtgcaggttcacaaagtgcaggagctgaataaaggttttgggaaacctcatagagatggaatctgtttgcttttgattatctcagtgtttccagaattgagtgtgggacttttgtgtataagtggaaaaggggactcctatttcgaggccacagaagcagttccatggtatctgtggggatgccagttttgtgggttttactgtatttcatgggaggatctgtggcagcactgcttgatagaagtacaatgagtcacatatgaaatgtaaagctttctagtcatcacattaaagtgaaaagaacactgggcataggggttcacacctggaatcccagcactttgggaggccatagtgggcagattgcttgagcccaggagttcaagaccagctttggcaacatagcaaaaccccatctctaccaaaaaaataaaatatatatatatacataggctgggtgtggtggcacacacctgtggtcccagctactcatgaagctgaggccggtggatgatttgagcctgggaggttgaggctgcagtgagctgtgatccagcctctgcactccagcctgggtgacaggaagaagccccatctcaaaaaaacaaaacaaagaagaaatgaaaacagttgaaattatttttaataatttacttaacctggtatatccaaaatactattttaatgtataatcaatataaaattattgtcatctttaacatttttttcccactatgccttctaaactgccactatgccttctaaactggtgcatattttgcacttgcagttcatctcagttcagactggccacaatccaaatgcttgatagccacgtgggctgatggttgccatgttggacagtgtaggtctatgagatgctttttgctcaacgtgtggtccaaaacccagcagtgtcggcatcacctgggagcttgttggaaaggcagactctcaggccccactcctatctactgaatcagaatttgcgtttagcactattccaggggattctgcacatgaaattgagaagtgttgtgtcagatgctctcttttccagtttcaagattttctgttccttgaattctgtgtggatgttgttagctaataagcagtgctgatgtgagaaagatgggcccctgtgtgcaagagtagaggtggctcatggaatctctgcttggcccctgaccctctaaaagggccctgggatccctgggcagaagatgtgcccatcacagtgtaatgaattctaatttgaatcttggccagggttcatcctcgggacctcagtgtgctgaacttttggggtggcaggctatcactgagacagcctagccaggcagcaggaggaccttgagcatgagatgatgtttgcacaggcatggcctctccttgctcactatgccgtgaaggtaaaatatcctacttctcagatagagggtgcaaagtttggtacaagtgccaatgcactcaaaggataaggagtagtccaggaccacaacagggattttagacagtttctcatgcatgccactggtgctggttgaccccttcaagcaacctgcatcacactagatacaatgagaaggacgatgggggagggaaagtgagttgaccaaggctgactccaggaggttctcctcttctcctctgagagccctagccttggcttcctcttggatcatgtgttccgactgttgtctttttccaattggcctccttgaaaggttttttggggatgcttagattcattctctgagttaggaatgtgtatctgggtgcagggaggggccaatgcttaggctaagacttgtgtttcgataggtggggcttgggtgtggggatgaccccaggatgggcgtcttgggtgttgcaacctggacgggaacactccctgcctgtcatctccacctcctttccagaatcctctgtcattgtttcttagggagcttcttagaaactctgcttctaggggactggtggggtggtggcaggggattgtgcagcaggggtgggtgggcaaggatctgcatctgcaggtctccctggacctcacctgtccactgccctggcccttctcacactcccagctgcttgctctcccacaacagggaccctgtgtctcacagttttggcattgatcctaggggccagcttccttgcttctctggtgtctctgattaagttcaggaaaggagcctcagcaattccaccaggttggctgcagcccaaatctctgtcattttcttgttactcttaacaatgtctgctgggtactttgggcactgtggggtttcattcatcagcccagatcaagccgtttttcctcttggattcacttattgtctcacatgacgttattcccccgctttcccttgcattcaccctctgttcttctttgatccagcctcttctagtcttcaaaagatgccatgatctttgccatcacagtacctttgttctctgccaggaaagacctctttcctccatttctccaaatcctgcttgtccttgaagactcagattctcaccttttcctggaagccttttctgatcattcctggccttgccaatctctttttataccagacttctgttgcatgtatggtcagtcaattcatcaaaaagcacatattggcacatgagtcaagggagatgccaaggacacagagatgaactagacctgacctctgccttatggtttagggaggaagacatattcagtaaaccattaccaataattagtaaattacttgcaaatgtgaatgggctggaagaaggcatgctgggtactgtgggggtatctcatggggagatatagtatgaggcaaggcttccctgaagaagcagcatttaacatgagcattgaaggagtgggtatctaaagcaggggagcagcacacatgtgagtcccgaggaggtcagtgaggctggagaggtgacagtcatgcagcagggacaggtgcacgagtatctgagaccacagaggcatggcctttccttgcagcatgctagcatgtgtgttaatctttcctagtccttctagttaggctatgagttccttgtaggcaagggctgcaccaagagcccttggaaactcggattcattcccagctgcagtggtatgctgttgcctagtgacttttagagctgattgataaattgtcagaaattctatgagctgtttaatgcacatcagttgctagaaattggccatgatgagaatatttacactatggaaattggtaaatgctataaatctgggctcttctatttttcctttcagtgagctggtgtttaaacatttaccagcacaccactgccagctgacgcagggctaagcatacagagcagaaggcagcagggtggaggaggaggaactcagaatagggaggcagacactgctgtgtgttgttgggaaagttagtcaacttctctgagcttcagtttcctcatctaccaaatgagacattgggatatatgtgaaaggatgtacatgagaaagaagtgataagaactgctcaaactagaagccccagcttaggtcagcagaatcagtccaggctggtttcctccacctctgttattcaagtgtcctcaagaactggacagtgcaggtctctgagatatttgttgctcaatgtgtggtccaaaacccagcagtgtcagcatcacctgggagcttgttggaaaggtagactctcccaccctattcctatctactgaatcagaatttgcatttagcaccattccaggggattctgcacctatcctctgttccttctggattgtttttgagtattgttttaaattttaccttaaaaagtgtaatattctctgttgtgtttaatttcacaagccatctcccatcctttctggatgaagatgggatacatgccttcctataaaacataaattgtgcatatcctgtttacttgcagtcatcacccctgacttcctaccccaaatctcgcagctgtcagtgggacatcagtctttacttttgcctgaatgttctatcccagcccttccctgggacagcaggaagagggctttcctccttctagaggctctctgagattcatgactcaactttgcaaggccatgttgttaatccccatgcctcagaggtattcagctgcaccacagccccttctttctctgcaacctgtgtcgacgctgccatttccccgggggaaaggggaagcagtgttgtcccttgcatggtgtctgccatgtgttgattacttaaggataatatttctggcagtggagaaaacgaggtgggaaatggctttcgcgggtgattaattgttgagatgacatggcagcttctgtctgtggccatgactcccaattacctgacaagaaagatagatttgaccaggagttcctcttcgagccttgtttctgagggctgcaggtagtgagaaataacacccaggacatttagaactggaatctgaaaagaaaaaggggtcatggagtgatcagtgtggaatctggccctgtcattgataaaacttgacgtgcaaacttgaccaagtcattttccatctgcaccttagtttacctctctagtgaaaggatgggcttgaactagatgatttccagagtccctctcagcactgagattctgtgattttatgaacttcaccaacgagctgagacattcctatttaggcttgttttatgttctaattcccaaggacatatttctcatggactgtactccagagactctaattatttcttgttagtcaagaataattttaccaagcatctgtaagctatgaggagcctgggatgtgtgtgtgttcagttttggagtgttctgggaattcagtttaactcaagcatttattgagtgttcacccttgggatgaaatatggtatgcaacatgggatttgcagttggaaacctgagtttcagtctgagatttgctgttagttagctttggccttgggcacacagcaatttaagttctctgagtgttagtttcttcacctgtattttataggtgaaggcacagagcctcttcattgaggaataaatgagagaatgtttgcagagcacacagcacagtgtttgaagcaagtaagtgctcagtaagtgttatttctttttctacactccatgccaagtctttgttaggtgttaggaatgcaaagatgtatataagtcaagggcttcctgcttgcaagacatctgttgactttaggcacacagacacccagtgatgatgatcagtactggcagtaagaaaatgatgatttggtgcataagagatgatatgttcagctcacagagtactgaactagaaagccaatggccagtgtgctcctgttgacaatcaggacagaaaaatacagtgcagctggggccgttctataaagacagaatgacagactccagcacggatttgagtttggggatggcatttagacagtccctcttggcagcaccatagttgaaattctccagacagaacatcattggcatttatgtttctagagctggactcacaccatgggggtgggattctaaagcttagaagaaacagcccttgaaagccaggggtttcttgcttttctggaagacaaagcatgcttacttgaatagcaagaaggtagaagcagagaggcatagctacatctgacccctggcaagtgcttgatgatgtgaacttttccctcctgcccatatttctttcctattcttttattaaagaggcagaaattgaacacttgttggtgttgagcactaagggtctagaagtgaatgaacctggtatttgcctctggaagattccagtgtgactggggagacagacatgtaggcaagtatactcagcaaagtattataggtgctaaggacgctgggagagggtacactgggcagggggagggaggtgaaaggtactaatattccacctggaggtgaggaacatgtggttgtatgaagatatctacagaaagagtttctgtgggtccatggtggtctggggaggttttctggaagaagcaagctctgagctatttactaacatctcccttcaggtcacagagctattccctaaagctccccaaggttggggaattcttatgtgtattttgagttctttctgctaggccagctcaaatgttgccagacattgcaagggtagtcggggctggcgggaagccctcatctaaaagtcaattacatttgcctttggaaaatgggacaagacatttatgcttaatatttgggtgtttttgttgttggctttaaaaaatttctttttcaggtcacactctgctagtgaaataccattaatttcaaatggaattaaatgtctgttctgtgtagagcacccttgccaaataattacatcaaatatatagtttgcaaggaagattgtctatttatcttttcttaaagggcagtccagaatccagacatactgcatggccccctccgagagccacccacagccttttctttagtcttttacccaagatcgctgtatcagctcatccttctccaagaacctgggtcaggaaaaattgtaatactcagagaacttttctgtattatcttcactaacggtatcagctttaataaaaatacaagtacccaagcttattcagcagcagggaaaaaaaaaaaaaaacctcacaaagcccctcatagttttactttgttatgtgatgacaggcagacaggcagagagaacaaaaaaggtacataagggggagatacagttgcttctagagtgagggagatgggggtggtggggggtggaggctttgggggcatcctacatgcccaggtcacagtggtacctcttgcgctgcaggtatctgtggctattccctccttctgggaccccagaattaagcatccttttggcctcaccttctcatagttgggagagttggctggaaaatagtgaacctggaacttgaggtgactctgaagatattcctgtttaatgtcatcattttgcaaataaggaaaccgatacccagacaagggaaattcagaccctgctcacagtttactgacaagtgcatgagtgaatgagaacctggctgtcctccgggggtagctgcacagttacacactgagctgcaggcaagggggatgagaccccaacatgcttaattcccaggctgtgcacttcccactgccccattccaacctgctgtagctcagtgaggggtgtgagcagagcaaagactgggactgcagcaggcaatgcctttgccctcgcaacctattctttcctacctcccatctgggtggtttttcaccaggggcaaattttgccttgcaggggatattcagaaatgtctgaagacatttgtcacaactggggggagagtgctactggcatctagtggttagaggccagggatgctgctgcacatcctgcaatgcacaggacaaccctcacaacaaagttatcagcccctaaatgccaataatgctgctgttgcaaaactgcctgattttgtgtgtgagtgtgtgtcgggggtagtgtatttgaaagagattagggctcagtgggactgcagtgagggtactgatatcattttaagggtgatggattaggttcctgttttacaaacttgcccacgcatttgagttatacagatagcttgttaaaaaagtatcaatttttactggggtgagattatatctcatagaggtagagagtgaaatggtggttaccagagactgggaagggctaggggagggagggttgaaggtaagctcattattgagtatgaaaatacagttagatagaaggaataagatctagcatttgtacaacagggaaattatagttaacagtaatatatggtatatttcaaagtagctagaagagaagaattggagtgttgccaacacaaaaggacaaatgtcttagacgatggatatcccaattaccctgatttgatcattgtatacatgtatcaagatgtcatatgtaccctcaaagtttgtacaaccattctataccaattaacaaattctaggcccggttccatacatgcatctccaggggtgggcctgggaattggtattgttactctgcttcaaaggtgcttctgacattgggcctatttggggaaataatggattcaggtgcagtgttggttgaacatttgttatttgcctattcagataaatctggattttaatgtcagctctgtcatttatcaactgtgtgaccttgggcaagtcacttattcttccagcctgcattgtctcattctcaaagaggaatgatcacatccacttcatggtttgcagtgagcatacaatgagataacatgcatcaaagcaccagctcagttcctggttggcagtaggtgttcattcctgtcagatgagtctggtagtgtgttaagttaacaataataatgagacccaacggtcgtcaaccactaatatcccaggcaccgtgttaaatgcttttataatatcttttctccttagcttcacagcaaccttgttttatagctggggcatattgtaggtacttggcctgtggtaggctgagtaatgcacatctccaggcattactggccttacagatgtggacctgcaaaaggtccacatctccactcctggaacctgtggatgttaccctatgtggcaaaagggacttcctgtggatgttaccctatgtggcaaaagggactttgcatacatgattaagccaaggatcttgaggggggatcattttggattatctgtgtgggcctgatctaatcacagggttcttcataaggggaggcaagtgatgagaggagacagaagatttaacaatggaagccagtcattgggtggcacaaggaaggaatcatgagtcaaggaatgtcaccagcctccagaattgagaataggcaaagaaaggaatgcttccctggagcctccagacagagccagccttgctgacatctcgatgttagttctctgcaagacccattctggacttttgacttctagaactggaagaaaataaggttgcgttgtctttaagctccatgctgtggtcttttgttgtagcagccgtaggaaaggaatactcttcctctggcctcatatccagagatgctgagctctgtgccaggcattgcagagtgacacaaggaagttggacacctaccacctgactgatgagaggacacgtacacacaactgaaaaaggccagggaatttgcagcaaggaacaaatgaaaatatacgagagaaaatgttgagagtaagaagatcttccacaccaggacttgcagtgtggacatccagggggactccacggaggaagtgtgaaggctgccggcccctgaagtatgcagttcatgccttgtaaagacagcttggtgccctggaaacaatgacttctctcctgcccagtgatccattggccccttagatgttgatcctgcacctggtctcctgccctctccttttccacgtggtgcagtggcttctgctgctgatcaacatattcccagagctgcctgtacctcccggtgactatgaggatggcaggtgagggcctcttcattccccatctccactaaccacgcaagtctctactctgccctgcctcaccccgcgcgctccgccatgttgattggtgagggcggtgtatgtcagtgctgagtaacgtggttattagaagtatgaattatttaaggagacgtgcacatcattaacctgtcattcatccgagggaggcttgacatgtgaattagccatgcacattgctattttgcttatggggaggggaagggaggtggaaggtggggcagcggggcaggagtaggggtgacgggtggtacaaataatcgaattggctgcacttgtgaaggattgggaagaattgccctgagaggaggcagtttttttttttttaagccacaacggagcaatttgatggcagagtatttttggcttcaagacactgtgaattggaaatgcaggagaactagcacgccacacgttcagcggcatctgtgagcatacataccaatatgatcactgtaattataataataataaatgttctcttgtggtgtgacttgtggaggtcaccctgagatgagaaagtgaagaggaagggaggtggaaagggaagctattaataaaccttagacacagccttcagctttcccttacccctctcctacactgaaccacgcatactcggccccctggcccagactttggtgacatatgagcccacctggtctggcatcatgaccccttggtagctgttcactcttccaaatgggctgctttgttagatgaacaggtcagttctggttattgcccctgtttggatctgcaggggcctctgctccaaaagcagatgctccttttgtgagctgctgaggtatgaaaccagatctctgggtgggatgggagataaggaccatttctgctagaatatgctgaattatggctctgaaaccaattacctttagagggagaccagccctagagttgttcacaactgggaattgcctgtgtcttctgacaatcatcaaatatttgtttagtgtctgccagatgatcctcttctttcaggggacatggaagtgtcagagaaaatctctcctgagaagtttaccatcttcttagggaaagactaataacacataggtactaactgtagaatattgttattattactatttccagcacagctaggaataatattctctaatatcagagagtcatatttttataagatgcattatattgctttattggctactggtggtaatagatggaaagtattgtcataccagtatggatgtgttttgcacagaaaatgaggaaaatcactggtgattagatgatagacaactctgtaggcaggtgtagtagtaatgctgatatctgacatctgcagaacgctttatagctcagatctcacctttgcaactcatttgatctttacaacagttgacagcaagtcatctgaagccagagaagttaaggagcttgtttatgtcatatagcttgtaggtagaagggctgggattggagccccttgtgatgccatggccaggacttgtcccaccccaccacagctgctagcatcacagaatgttatgtatttgtatgtggtatgtgtgtcacagtgctctatggtttcaaagtcttttcacatcaatcacctcctttgattctcacagaggttgagtgcatgaggtaggttcagttttattctggccatttcaggggcagtgggtttgtggaggattagccttgaaccatctgctagctgatgtgttagtagagcatgttgactcctggagaaaacacacacaaatatgtgtacacacacacacttttcaagaaacaaaaccacacagaacaaacaaaaaatgataatagaaagctgcaagtgtaaagtatattaagtatatttactgtatcattgtgccttgctaattaccagataacagttatcctttcttggattccataatgtaacagcataagatgggcaggtgcccccatatcctgctgctgctcatcaggcctgatttgggtatttatggttgtcctggccttttggtatcagggtgagtcttcctgctcttcagctctggacacctcttggtctgccctattgttctgccatcatttgctcactgtgttctcctttagataaaagaatggagatggaattaagatggagttacggagctttacagctttacacactcctggtttttgtatctacttatagaacggggtgtatgtgtgtgtgttttggtgtgcatgtgtacccacagacacactcacaaatgtgcttgggctgaacttttcctccacacctaataacttggagcaggatcatgccattgtgtgcatggatcatttgtattaccggttctaaggcagcattattattttaaacctcacttatgatgtttccagtgactgacaggcactgtcataaatctacctgatactcctgagcctggagttgttgacgtggcttaggatgtatctcccggttgtctagcattgctcacccatgctgagcctgctgttcatttcagctgacctgcttccaccaagagaaggcagggagcttgggaaccaggtgaaatgggcagtggtctgccctttgttgaggctgtgttgcttcctagagcaggcttccctgagcatcctgtcactggaacctgggaggatgacacagtactgctagcaagatgtgcaataagattgcaaagatgtctagtctagttcatctttcttatcagtgcagtaactacaccttacaaaggtcatcagcctgttcttggatacctacagaatgaggagatcactcctattccaagggaactcattctgttgtagagttagaacactcttcttatgtttggccaacatgtggtgagataggaagtgccctgggccaagagtcaggcatgagctcattcttctcctgactcccttactgataaactatgggatctcgggaaaatcacattatctttctgagccccagtttcttctgaccgtgaaatggataaattgggtttcagatacagctctgagatgcttggggtttctggaagattcctcaggtgttgcaaagaagattaaggtgatggtcaagtgttgggcatgagtccaaccatactgaatgagaattattatgattttgtgttttacatatgcagttttgagtcaatgatttttgtagctaaacaagtttaaaaaacaagactagatccttcaagattctttccaggtctcatattttatgatctttgaaatctgtagaaattacaacaatctacttagtattatagagtaatactattttaaattcactttgcgtggaatgattctaattcctcttataagacagccttcctaatatccttgaccatcctaatgtccatatgtgcggattgtgatgtgaatattaagacaggtctgttttggtgtcctctttccttacttcctctcctgtattactctcttttctactccaagtgcttttgctgtttcctgttctcaatagactattggacctggccagctctcacaggagaaattgtctgatcacgttaccctggaagaagtgtttgctgatggtgatttagagttttgatatcttccaaaatatttgggacttctgaagcctgaaagtctaaacctcttctcaaaaaatgaatcttggggccgggcgtggtggctcacacctgtaatcccagcatgttgggggaccgaggcgggtggatcacctgaggtcagtagttcagcctggccaacatgatgaagccccgtctctgcaaaaattcaaaaattagccgggcatgatggcaggttcttgtaatcccagctactcagaaggctgaggtggaagaattgcttgaacccaggaggtggaggttgcagtgaaccaagattgcgccattgcactccatcctgggcaacagtgcgagactccgtctcaaaaaagagagagagagagaaaaaaaggatctaggatgatgaagttggaggctcaaagatgaattgtgtatgggctgttctcttacatccttcagctgattcttcttcatcccttcctcaggatgtgtttgccctagaggtgtatttgtaattttgccttacacaagtgtttccaaaagttaatcctgtggaatactaatcctaaatgctctgagataaaaggattctgtggccagatgcctttgggaaaatactgtgtattatgttttcctcttggagattcacaatgcaccttgatctgtttcaggatctgaggaatccatcagggaagagtcctgtttatctttgtttaattccaggtttcacaaactatttgaccacagttatcttgtttttctctaggaaataactagaaaagaccccagaactggtgttccccagagcatagttgggaaactctagagcagtggttctcacctcgggtgattttgtcccccaggggacttttggcaaagtctggagacatttttggtggtcacaacttggtggtggggtgggagggtgctcctggtatctagtgagtagaggccagggaggctgctattcaccctgcaatacccaggacagtcacctccaaccaagaattatctggcctcaaatgtcaatagtgccaagattgagaaactgttctagaaataggcaggtacaaggtgtgttttcaaacatcccttgagccatttgtaacagcccttcaaaatcaagctttgaagccaattcttttgtgaccaggagtgttttccggacaatgcagaaggagatgcacccagatagtaattccctgaacataaccatgacaaattcagaactgagttctccttcaagtgcagaggcagcagtcagctccctgactctgcaggatgtgggctgggatgaaaggccccttctcagtgcagagcgtctggaatcaaggctgacatagcttatcaccttgttcttgtcctcccttcctggaatcaagtggtttagcaccattataggaggaacctgttttcctagcttgtagattgggccttatttctttctttaatcttgcctcaagcctcttttctttttcttgggctgacagggctttgcagctcattctggagatgatgttgacttggtgaaaaaaaatgtgcttgctattccacaaagccgccattgtcatcctggcccgttctcaatgagctgttgggcacacctcccagacggggtggtggccgggcagaggggctcctcacttcccagtaggggcggccgggcagaggcgcccctcacctcccggatggggcggctggccgggcaggggggctgacccccccccacctccctcctggacggggcggctgcaatggcggctttgtggaatagaaaggcgggaaaggtggggaaaagattgagaaatcggatggttgccgtgtctgtgtagaaagaagtagacatgggagacttttcattttgttctgcactaagaaaaattcctctgccttgggatcctgttgatctgtgaccttacccccaaccctgtgctctctgaaacatgtgctgtgtccactcagggttaaatggattaagggcggtgcaagatgtgctttgttaaacagatgcttgaaggcagcatgctcgttaagagtcatcaccaatccctaatctcaagtaatcagggacacaaacactgcggaaggccgcagggtcctctgcctaggaaaaccagagacctttgttcacttgtttatctgctgaccttccctccactattgtccaatgaccctgccaaatccccctctgtgagaaacacccaagaattatcaataaaaaaataaattaaaaaaaaaaatgtgcttgctgtcaagcacaagagtgtttctgggatagggattctttaagtcttggtgatttctctgtttccataaagcagagcagtggtgcttgttagtcaccagaactcacacctgcagtcttctccattcaatcccattccatctcagggagggcagtggggattgttctagttctcgggtgttctgattttctaagttagtgaacgtgaagttccttgggggcatggatccctttgagaatctggtgaaagtggtcaatcttcttacagaaaaatgcatactgatgcatgcacacgattttacataagagaggtagcgcatggacctgtggtgttagtaatctcagagtttgacatgatgagtttacaggacacttcttggaggctgtaattgcttttgtgaatctatactgaatatcaacattagggtgcatgaggggaggatcctctttagtccctgatctctgagcactgctattcttggagattcacaacacaatgaattactactttcttgtgttttggctcattcattcattcatttatttagcgcttatttagtttctatatgtcaagttctgttttaaccactggggagtcaaaggtagacagtcttccttgatcttgatgataaactatataggaattggaagccaaaaaaaaaaaaaaagtgtagtggctcttgcctgtaatcctagcactttgggaggccaaggaaggcagatcacctgaggtcagaagttcgagaccaacctggctgacaaaaccctgtttctactaaaaatacaaaaaattagccaggtgtggtggcacgtgcctgtaatcccagctactcgggatgctgaggcaggagaatcgcttggacccgggaggtggaggttgcagtgagccaagatggcaccactgcactccagcttgggctacaagtatgaaactccatctaaaataataataataataataataataatagtgatgatgatgataaaagaaaggaagaaagaaaagaaaaaaaaaagaaaattaaatcctgaaggcagaagctgagaggaatggcttcaggttcaggtgcagagcatgtgctgggtgagaacaagccattcgagaccaggtccttgcctctgtgggtactggctcccttggtctgtgacccacctcctggaattgaagaattgtgcaggatcaggcagagttttctttggtgcctggcacttggttctggactgaagcttggcttaagaagtattttaagaacactgtaggaaaccattcagaaccttccaccaccccaaggcagcactgcccactcctgcttttcagtgccctctgcagaatgctatggaaattccacctgcccatcctgccccaccaaaagcatcagatggctaagctagacttgtagctaggctcaaagtactcaccagtgcaaaccaacagagcagcacagtcatggacagtcaccaagaatgatggccactttggtgacatcccatagatgttatatgcaaggagcaggagcacacagagtcctcaccttgggattttaggatttgactcatcagttgtgatctgtttcgccaaaggaggaggatgtgaggcagctgggggtgggattggggaggataatcatattcttggctcatggctatacctggtagggggtaaggttgacttttctgatcccagtattcttattgatgggtgctcactgatgctggagtctctgttgagggcataataataattttgcagaatgatgaagacctttgcaatgaatcatgttaatgccacagttacttctgttaggtctgcattgttgagctccataaggaatcataatgaatccactgaaacaactagatatctcctttatagttaggactcacattttaggcaacctggggagagcatgagctggtctgttagtttgtgctggggagtactttgaacttagctgcaagtccagcctaaccatctgatgctcttggtggagcagggtgggcaagtgggattttttttccagaaagaatttttgcctgtacaacatcatgatgttctcccatgaaaagggacaatgatgtccatagcagttggattcaaaagaagaaatcacttttccataattggtacctttttcattccctcttaaaaaatacccagcccgctaccctggccccgaatccccagtgaacttcagtgcagggaaacagaaatgcagagaaattacaattgtaaccaggtaatgagagtcagctacaagcagacggctctctgcctgtgaaaacagggcttacaattgcagatttttatgactccattttctgctttcaacatagcctgtcgacatctcaaattgagaagcccatcaatgtggcctgggcagcctccttccagctcctgtgtcaggagagatttattattcttatagactctacttggagccacttcttccagattggcctagagagggaggcttttatttaatttaattttgctgagaactacaactctgcagagatgcatgttctctctcctgaggtaggtttctgagtctaggtgaggaaggtggagtaattgaatcaggcaatggttgagttgaaagaaaactaaaacggagccaaaaggccatttattgttgcattgtgggttctgaggagtagaaagataactgtaatgtctgtcagtgggaaactggttaaatcagttatggtgcatttatagaatggaatactatgcagctgtgaagaggaatgcaaaagatttatttcccctgatcaggactgatctccatcagtccttaatgtaaaagaaggaaaaaaaatacggtgcagtatatatagtatgaatccacttgcataaaagtgatgtgtaaatacatactttgcatctacaaggatgatctctgggagagttcataagaaacctgtaatcctgtttgccactaaggaagctgttgttgagggaaaggggagccagaaaagcttttcatagaaaaccctttagtgcttctggatttgtgttttgttttctattatgtgtttgtattactttctcaaatcacttaatgttaaaaatgaatttcagatctaatagtggctagcaaggcttgcttttggaaagatgagcaaattgtggtttgaatgtgagtaactgaagctacccagaaatgaaaagtgtctccaggaactctcattattatgtgggatttatcactgctaatgataagtaagaactagaacctgtcggctgaggtacagttttaccttcatttatggggatgaattgagtacattatgggccacataaattgcatttacaccacaccgatttgttatgtgccatctgttagaagctggaacttccctcctaatgacatctttgtcttcccccacctgggctcctagcttcctcttccagtggctggttattcttcagcagggtgaggggggcaggagtcaaagagataatctctgtgtgtggaatggccaagtgggagcaagtgagaagtggtgaggcctttgatgactagtgtggtgtgtcccttttgaaaacagtcaaattcagcttaaaaaaatacctgcagttcataccttgttcaaggtccaggcttctaaatgcctttcttgaacatttccaagaggtcctgtcctccttctgtaatgcccagccttgggcatctgataggtgccttgtgagtcagaaagcactctcctgggcattggtgctgggagtctatgggaggaaaattgaccggatagccagaggcagctcagctatttgcgtctgagtgcatttagcctcaaggtccttaaaaggcatcttgtctcctgttttggacatcagattcctggagggcagggatttattcatctctccactcagggcagaggttaacacatctctccctgggcttttcttggaaaacccaagtcaggcagggtgttactgggttctaacattacaactgggagaccctcttctcaggatgtagttctctgacaggaaatgtaaaaactacaattgctaagaaaagtaaatgaatggatgaattcaaaaataaatgaatggatgcaatggatgcacaatgtttagtcagaaaaaaaacttgatatgcattcagtgaaaaattgttgttctttgaaagtgtagctgtatgtggggatgggctctgtctgtcctacttccaaaccctctgccaccacccaccctcacataaagaacctctggctgtgtgatcctgggggcactgtttcccctgcctggtttttctggctggctgggatgttggctgtcccagtgtgcaactttgttggataattcaggactttctcttcctcagcctgtcttttcttaatggtgtggaatgactcaggattctgtgccaatgcctccataactcttctcagtaactaacctatacaggggtgtcttccccaggacaaaagcaggagagcctgtccaggatctataactgtttctttccccgtgcagaagcaccaaggtgcagaccatatctaaaagccaccacagtactaaataacatgatgcagcagaccctggttcctataaattactgaaaacagtgctgaaaagataatgtaaggtgcataaattcaagtatttagccagaagcgcattaacttagggcagacaaaaagaaaggaagaacattaacaaaccacttcctggtaagagttttcagtagatggagaagtaagagaagaggggaaacaaaaagtcagccatattggaaaggtggttagagaaaaggaagaaaaagtgtagagatccttttccagatggtggcagaaaaccttctggtcctgagttggagctcccaggtggattgattaccattggaaggtcccatctctgcagtttagcagttttctcatctagtggctcaaatatcaccttttccctgaagtcttctccaatgctccggatgaaaacaaatctctctccaagatttattctgttgcattgtttgtctcttagtgctgactttctattctggtgatgattatttgtgtccatgttttttttccccctaaaaatgtataagctctctgaaggcagagattgtgagttggtgattgacaattcagcagctattctactgtttagtatatgccaagctcagtgctaaagggacataatgaaatgagcaaaacatggtctcaacgctaatgacatttacctttagcagaattgagtacagttctttgcatagtatatgagcaatcactattgaatgaagctggctcaaccctctcttctttgttttaaggatgaagaaattgaggtccatgactacttgaactttataagataacactcctgctttgcataaggactaaaacaggcaacacttttttttctctctctatttgatagtctacaagcagcatcattcccttggccagttgtttcacagatgaataagtggggctgggagaacctggaggtagccttaatcccatagttgggaatgcaacttccagggttcactgagagctaaagaaagaacgtgaaagaatgatcaaagcaaggccagtgggggtgtgtatgtctgagaaaggctagaaaagccgaggagggggcctgtggtggaatgggaggctagatcttggggcaggctgaccctgggctcagatggctggaggtgctatggattcagagccctgtaaacaaacatatcagttgaaacttagcttaagtcagtcctttgttgaactcgacaaacagcctttccttttcctggttgctgtgcaggttggttagagctggaagataacttaggaagctgtcgggttcagcctttatgcaagtaagatattgcctgtgtttaacagatgacttaaaagaggctcggtgaggttcaaggatctaagaccactcaggagagctctctagttgatggcagcccagtggtgatgagtggagtgtaaacttataaaccattgtgaacattctttctgattaaatttcagcagaatcaggctatgtattcaagtgaagctcaggctctgcagggactaaggatgcctttagccctcagcttggagcgtgggaatgctgatgtctgacaccttttcactttggctgcagtgtggatgactgaggatgacttaaggtgcctgtgcttctctgagatggtctagagctggagcagccacaggcacacagaatcatggggcctgtctcctcagtgcttctccattcataagcagattagttatgaatgaagagggttcattctcaacagaaaaattagttcttctgttgacccctaaggatcatctagggttctctgcaactctgggaaattgggagctcattttaattgggaatctttagatagggtggtcatagctgatatttatgttttatgtacctcttttttttcccctaacaaagtcagtagttaaaaatcttttgccaagatcagagttgttatatttctattttggaaaaaaatcagaaagaaaagaaggggttagattggaggcataagtatagagggaagcctgggccagtgtctaccttctttgcaagagaaactcatgtttttggggtggttctggtctgaattcaaaactcagggcctgggaaagacagttatctgacaaactcctacaacaccatgcatctctatcctggtagatgtctctgggcagtagggcttggtagggagatggtggaagatctgtagtagggcttccacactaacctggctcactgctgcctatttgtccagtgcagctttgaggccatttacagtctcattcttcagaaccacattgttggtccctctttgaggccgtatcccattctgctttgcttcactagctaagcatgttaatgactttgtaagaccatttggtccttcaaggcaatgagtgttttattccccttggattgctcatagcgcttgcactatttctggcagttagaagaaatgcaatgaacatttatccttatggtctttggaacatttcctgcttcgggaagtaaaattttaagtattcttggtatcaaggtggctaaaattcttctactttactatcattattttctttgaaagattttttgaaagaagcctctttcataaaacttatgacttggatttacgtgggtttactttctctaacttcctacatttttgtaggttgtatatcaaacttattttttttcacattcttcctccccaggaagactgtgggagtctcattcttcctccccaggaagactccttgagtctcacacaatgtctgtgttcttactttaagattaagttattttggggtcatggatttcccaagtttatcccttgataagtggtctcactgcaccaatattatggttgggcaaagaaggagaggagccttggaatgtgaatcaggcaagtatgattcccattttcatcatcacaacaaacctgggataagcattgttatctcaatttttgagaaaaagagattcttgtcactttaaaattgagtcattttgaatgtcagataacacaacccgatctcagaggtgattatttttttttcacttagagtagcagaataggaagttgaactctgtaaaatacacagactctacaattagggtaattaaaataatgagtctatattcttccttttgcccaaggtcatacagccagtaacccgtgaacctataattcaatcccaggtctgctggattaaaatacttctagttttttatggttgaaagaaaataatagaatttatgcattgtgcgtgactattgaaagcttgttggggagctaaaatgaaatttgacaatatgtgtcttaatagggtgacattggtaggatgttggggagggtgggtgctgtgagaaggaaagaataagttgaggtctgtggtattacaatattccaggaagaagattatggaaatctggactgaagttgtgggaatacaggggatgggattgttaggacttagcaatgattgaatgagttggcaaacaatgaggtcagtaatatggcttttagtatttttctctacatgctgggaagcacagtgacaccatgaaccaggacagtgacacagacagagcagcaagtgtattatttagcaagctgaaaggaagaagaatgagtataattttgacatatgattgaagtatacctgtagttctaaaggttggtgtcttccaggaggcaaatggatttataggtctgaaggtgaagaaggacatctggatggcaggtggaaattgtggatctactagcatttaggtggcaatgaaaccgtcagagtcaacaaaatttctcaggaatggaatggggtgggaggctaaaatggaatttcgggaatgaccaaaatttaagaggcagagtgtggcaggtcagtgatggcaaagctgagaagaggccagcagatttttaggagaatagggactggcctttctctcatctcagttttcatggcagaggaaagtcgcaggcggctgctgttgtctttggtggcttcctctgaagagtttctaagatctccccaacagggtcattcatctttgaatttctggagcagtcacgattccaaatactttgtactattgtcagactctatacccgtatttttgtcaggcctcgtgtccaggtttttggtttggaaaatatggcatgtgtgtcactcttcagctctctggaatgaagaatgagatactccccagtgagcctgttttccttcaagagttgatggctggggctttttctattatgaagccaaagtgatgaagagccaagtggccgctgtggatgggaaagacaaacagcaatacagggagtgctggggcccagagcagatgcctgtggaatggagcagagagtgtttcaggatcccagaggaagaagagctacagtaatccaggggaaatggaccagaagagcctccatcagaaggatttaaacagacaatcaaggagggatatcaaggtagatagggtgtgtgtgtgtgtgtgagagagagagagggagggagagagagagagagagagagagagagagagagagagaatattatccagcatagtagaaaaggaagagatttagaaggttacttcagtggaaacatatagcatatgccttctcacaggttttgctgccacagcaaagagacttctttggtagcaagatttaggaggaagcacatcagaaacaaattccttggcgtaaacaccctttccctcgggatagtgtagcccaacactcacttaaagcttgtagaggaggagtagcctgctttcctctaccctaagaaaagccatagatggtctcagtgtggtaaatggagatgagtaagaaccagcacaataggagctggtctctttagcattctattcttaggtatatcagacccagtttcccgtttttataacaaatattttgaaacactcacttgacaatactgaaatgacattcaaagacaatgtaactttcctacacacacaattaaaatcagcataatgccctaactataatatgaagcagaaataaaaggggagtaatttataacaaaatagtatacatttcaataaatactcgggtatggctacacttgaagatataacgaagtcatcagatggttcctcctatatatagaatcaccatgaataagagctataaaggcagactgatcgatcagatgtgtgctattggcagttcaaacactatgaatggcatttacatttattatgtaatttaaaaaaatggtgaatagttttttgtaaagttcttcatagaataagttaatcttcctttaatctacatagtatttgtattcctagaaaattcagtccattaacactatacaaaaatattttttgctttatatgtaaaatgaatttaggtcataggcttggttcatgacaaacaggttcttccctacaagaatgtattgtgggatattttcaagctgtgtggaatgtcagacaatttttcatggtacaacatggtgtagaatgatcggcattcctgccttgtcactaaatccggtatttcagcaccctgtcagatttttcacatgccccctaaggggcagtagctttcttgttgataaccgctaagttggagttggtggtggccagaagagaccagagatgatgggagctgaagagctgcagttatcctctatgatcaattcttggtaccctatcagggagctatcctggtgctggttagactttggtacaatctaatttgattcccactgacttgaccaattccatgttccacctgcaaccaagattctttgatcttggctttctgatctaaaactctagttaccaactttagccttctccatactgtgagtcatatgccccctagcagagcgctttgccctgctttggacccaggaaccttcctgagctgtcatgtgtctttggctgcaccttcatgttgggatcaaaaggagaaaaggatcatgacttctaagtaacttcatatgaaagtcctcaaagagggattgcatgagttgtctcccagacgagtagagcacagttgtgttctcacatttgggtttaataggtagggcctgggagttccatagtttgttccggatttgtgaaagcctgtccatgctttacattctgtagctagaacgctaagtggtattttccagagtgtaagaattgttcatctagaacatggatatgataataaatagcactggctcatttgatgagcaaattcatcttttttcagtttgcttttaatccctttaggatatcaaggagaaaatttgagtttagggtagagtgtctttaacacattcctaagttgataatctccattttttttttttttccagaaagaaaagagcagacttcaggctcagagtccatagcagggagcagtattgactagaccttaatggcttcatttccctgcttcacaattatttttatgattactctgcatttatggcaggtgatactgtttttccattttgttggaaatatacagttttcttttaaagtcaattaattatagttaaaaaagaatagccaatttaaataagtacatcaaatttagtatacatgttacataaatgtagcttgtgaagaaggtggcacatgaataatttaagttttggaaacattgccattttgtatcattcaagaggcaggttcctgggtgtaaaacaagttctggggcagaggcagaccacactttcagggtattggctggttgtcagttcattaaattattagttttttgcacagacacactccagactatttactattcttgttgaagtctttgtccctggataggaaagcggcatgtaaatgcctcatataatcagtgatggatggcccttgcctgtcagtctctgacactttgagtgttcagtaatttcattatctacccatttctctactctttgcagcctagcacttacaacaaggtggcattcatccctaatgacatgggatgagccaggattctcaagaatcattctgcttttaagaaggatgaaattccttgaaagatgacatttcccatttttttcctccttggtttagaacaatgcaagactcggggctaagaatatttgcagttttaaaaattgacagaaaagaataattagcctaggtaagaggtctataaaatgaaacatttagtgactaatgatagtacttgaggtaaatgtttgttaaatcaaaatggagtaagtattttttccaaatacggtttttacaacgagctttgatatggcttggatgcccaccaaataaataaataggagccacatttgccattggtttgatgaagccaagctgtttgctcagccaaccttggccagttttgctgcttggagagtagcaaaaccttgaatctgaatcaaggctgatttttttttttttaaaagagacagttcataaatgtgcttgatacttacaatattgtttgtaattgtttgactactatgtgcctcacacatttatttcatctaatctttagagcaatgtctaaggtagctttggagaagttaagtaaactgcctaaagtcacacagtaggtaaggtgggaccaggctttgaatttcacatctcaagactgatctctatatatccaaagtccatgcttagctaactttttcttgaaaaatccatctagcctgagttgaaatattgtccccctcccttttaattgcaagacacttccaaagataagaatcttgggagattagagaaaaaaagtatcttgggtgctgaaaacaaaacaaaataaagaaaaacacatactcacatgcagttttctgggtcccagctcagagctactgaattagcatttttgagagtgaggcctcatcataagtctaacaagcccagaagtgttgttagtcatcagggaaggttgggagatggtgcataatcccataaggtaatttcaggggtgattttcaaaatatttaataactagtaaggactcaggcactcatcaattagaaagggctctggctgtagctggagcaggtcctgagactctctcagtgccaagccttagctcctttgatacaggatattaggaaaggtgggagctctaaggtacagctctggggtgcctgggtggtggtaggatacatgcagaacttggagcaatggcttgttaccaatgagccttggagcatgtcagtatcttaactcatgtggccgtataagtgagtaccagttgactatcagtcctggtaacattcatgtaagaaactggaagctggtgtgaagggtgggttttttttcttctataaaccccatatttctcaaagcctcaagtcatctgcataacaatcacagagaagctctttttaaaaatgcaaatttgatagcacaacatacttattagaattgtgacaatccaaaagaataacagcactaaatgctgatgaagatatggagcaacaggacctcttatttgttgctggtgggaatgcaaaatggcatagccaccttggaaaacagtttggtagtttcttacaaaactaagtatccactcaccatataatctagtgctcatgctccttggtatttacccaaacacattgaaaatgggatctaattaaactaaagagcttctgcacagcaaaagaaactatcattagagtgaacaggcaacctacagaatgggagaaaatttttgcaatctatccatctgacaaagggctaatatccagaatctacaaagagcttaaacaaatttacaagaaaaaaacaaccccattaaaaaatggataaaggatatgaatagacacttctcaaaagaagacatttatgcagccaacagacatatgaaaaaatgctcatcatcactggtcattagagaaataaaaaccacagtgagagatactatctcacggtcagttagaatggcaatcattcattaaaaagtcaggaaacaacagatgctagagaggttgtggagaaataggaacgcttttacactgttgggagtgtaaattagttcaaccattgtggaagatagtgtggcgattcctcaaggatctagaactagaattaccatttgacccagcaatcccattactgggcatatacccaaaggattataaatcattctacaataaagacacatacacacgtatgtttattgcggcactattcacaataacaaagacttggaaccaacccaaatgtccatcaatgatagactggattaagaaaatgtggcatatatacaccatggaatactatgcagccataaaaaaggatgagttcatgtcctttgcagggacatggatgaagctggaaaccatcagtctcagcaagctatcacaagatcagaaaagcaaacaccacatgttctcaatcataagtgggagttgaacaatgaaaacacatggacacagggaggggaacatcacacaccagggcctgttgggggttggggggctaggggagggataacatcaggagagatacctaatgtaggtgatgggttgttggctgcaacaaaccaccagggcacgtgtatacctatgtaacaaaactgcacgttctgcacatgtaacccagaacttttttttttttgagatggagtctcgctctgttgcccaggctggagtgcagtggtgcgatcttggctcactgcaagctctgcctcccgggttcacgctattctcctgcctcagcctcctgagtagctgggactacaggtgcccaccaccacgcctgcctaatttttttgtatttttagtagaggcgaggtttcatcatgttagccaggatggtcttgatctcctgacctcgggatctgcccgcctcagcctctcaaagtgctgggattacaggcatgagccaccgtgcctggcccagaatttaaagtataataataaaaaaagaaaatgtatgtctacacaaaaaaattacatggatgttaataacaactttatacataattgccaaaacttggaagcaaccaagattcctgtcagtaggtgaatggataaactgtgatacatccagacgatggaagccttaagaaatgcactattaagccatgaaaatatatgtagaaactttaaatagatactactaaatgaaaaagccaatctgaagaggctacataccatatgatttcatatatatatatatatgtaaaacattctggaaaaggcaaaactttggagacagtaaaaagatctatggttaacagtagttagcgaggagaggggaatgaatgggcagaccacagagtatttttaaggcagtgaaactattctgtacgattctacaatggtaagtgtcattatacttttgtcaaaaccaaaagaatgcacacctctaagggtgacccctaatgttaactgtggactttgggtagtgatgtgtcagtgtaggttcattgattgtcacaaatgtgccaccctggtgctgctgggatactgaaagtgagggagggtgtgtgtgtgttggggaggcgggtagggggtagatgggatatctctgtaccatcctttcaattttgctgtgaacctaaaactctgctgaaaatacaatttatctgaaaatagtaataaaaattcagcttccatagtttagccctagtcctagagaatccaaatatgggtggagtgagaaaagggtgacaggaacctgcatctgaaacaatagctccccaggattcctaaacacatggatggctaagaactgttgtgtgagaagattcagtcactggcagatcattgagcaaacacatttccttcccatcccaccttctccatttctggtttccctgatggttgggctgatcctctctttatatcactggttttaaaaactgctgcttctatgaagtgttttattatttagctagtcagcactgagtcttccttctcctaaatttgtagaaatcagtcactattttattgctctttttccatgtgtgtatgttcactttttctagcatagacaggcagctttattgtaaatggtaaggggcacagtcagatggcctgggatcaaatcccatttctgccactcattgttggtgtgacttagggaatgtcacttaatctctctgtgcccagactccctcatctgtgaaaatgggggaatcaagagggcctatttcatatggaagtttgggctactaagttagggcacagtcacttctattagttttctgctttctcttttctcttagaggaaggcagcgtaggggagtgggcaggctctgcagcccaacagatctttgattataacctcggaaaaattattaaaccttttagaactataatttcctcacttgtaaaatgggagtaagaatgtctacttatcagtgtaattttgaggaatgtaaaaatatcacctctcttaaagggccagctccccaccagccacagatgaatgctcaattgaagtgaatatcccttttgagcctgtcactcatgctgctgtgaacatagtgaggactgaatgagtgtgggaatgaatgatgcattgcggttcagtgtagatgggatctttgaaggtaagatatggatctgttgctgacatgatttttacatcttaggactttcatctagggatgtatgttttgaagcagggcccgaaagaaggaactgaagcattgagggatgcatttaattcttacaccaaaatcttacatgaatttacagatacgtaaactcttacagtgtcattgtagtacacagcaagggcaagcttcagatctgttaaaaaattggaaatttctaccacttttgaaggtcttaagtttaaacactgataagaatagaacttacaatgattctgaaagatcctggcttctttgatgttaaaatgggaattgtattctctgagacctacttcccattgccagctcactaagcaattgctcacattttctctttttactttattatattttaagacatttaaaatattttggtgagtcattcttcttggtaattagttgtagtgattagaatagcttttatattctaaggcattaagtttattttatacacctcaacattattttcggtaatgacctagaatttaacaacggttttgcaaagattctggctctctgaagccaagagatggggagactgtcaggtgataggaagggagggcctaaaatctccatattctgcttttattaggcaatcaagatgagaaaatagcaagaaagaaaagttgaaaagcagccacaacaaagatgagattttatagggtttatacaaagttgatttttcaaaatcttgtaatagtttttggaattgagataatacttttaaacctgaactgatggatctctttggaatttacagaaagaggtgctaggctatgatttccccaaaaaagtaattgacttatcctgggaatagccaggaagcagcaaagctgggaaagtggggagtgtgtaggaccatgaaatctggcttcctgattggatggagcaaaaacaaagagaggaaagatactcagtttcaccactgtgtggttcaagagtccagttaagacctattgagcatctacagaatctggttccctgaaaaatgaaacataaacagaatttgttgctattaaatgctatggacaacttttggacatcaaagaggtcaccattctggtagtggggcctggagtcatgtgctcagagatcttggagagagagcatagagagtaggagacaccaaattgagttttttcactcttttctctttccctcctatggccctgattagtttggagcataggcgaggcttctgttatcatgaaacccagaatgctgaagcttgaacaatatggagatttctttctctccaatgtccaggtgtagatgggtggtccagagaggggaggtagttctgctccgcaaggtcatccagagacccaggcttcatccaccttgttgctctaccaccctctaagtttgtccttttcacatagttgaagctactcattgtcacatgcatgctgatagggagacagaaatttcttttaatgaagtgactcagaaattgcatgtgtcactttcactcacatttcactggataaaaagcaaaacaaacaaaaacttagactcatggtcacttctagctacaaggaaagtagagaagtctgtagctgtatggagactgaaatttggtagaagtggttctgtttctaaaagaaagagaggggatgggtgagggaggagagctggtagtctctgttacagatcccaagactctgttaagtcagtggctttctgattctgctgtgaggtcccttagggttcctcagatttctctcaggagctgcctgtaggggaatggagaggctgtgggctgagcactgagcattgggattccaaacctctcctcaaccagctcaccttgattttacctgtattatgcattgggttttcacataactttcccttaaagaaggttttcctgggctgaaatatttttgaaaatcacttctgtaagcactttctataatcctgtgtgttgcccatcactagcactttttcccttctcccttattgccactctccctttctggctatctctgggttgctgtttatagggaatgcgtttaatgtttctatgtgagtccccaggctcatttattcactcaagctctcactgcaggtgagtgaccccattttttacttctgggttctcatgaaaggcagtattatttttctgatcattttctcctccagctcttccttggagagtcctctgcctcctccagggcccaaggtttcctttcttgactaaatttactgctgtcacagggatttccagctccctactaaaggctgtttcaagctccagagaaagaccagccccatcctcttttaccacacaagactgagacccaagtcagccctggagaactgttttggggtttctattcacaagtttgtggagctatatcatcctttgcctcctctaattaccttgttggcataaacggttctattattttaataataccttgaaatttcttagggcttttcaatttccacagctttttcacatggatcatctcacttgattctgacaagtgtccagaagatgagcatctctagaatgcgaattttgaagatgaggaggcaggtgctttgcaaagatgaaggaacctggcccaaggccatatgaccactaagtggccaaattaggatttgaatttcgttcttccagccttacatttcatgttcagaaactcttgactatatgaattgtagagagcatgaaacaggttgttgaaagtttcatgatttttgcttcataggaggggcccaaagcaaatgttagttttcttccttccttattctacctgatactttggtaaggtgccctcacttgcatgattttatatattcttcacagtagtcctgggagtaggcagggtggctatggttatctgcattgcaaagatacagaggccacgatagaggaagtgactctaccactgtcacacagttagcagtaaaacccatcaaccagggcatagtgcagtcctgttccatgagctgagctgcatcgtggaagtaggatcttaatgcatttattttgaaagttgatattcaatcttcagaagtcaacaaaactcctggcagagatagaataagatttggagatttgataccatttaggaaaccagaatagatgccaaattatctggcatgagttgggcaaacttacttgatttcaactggaaagactggtgatggactggctggttggtgtgagcctcctgtgtgccttaggaaagggtggactctagctagatactctgaggtttcattcattcacttgtgcattgatgttatctagtcactcaaataagtggagtttagataagtagatccatgagagaagacaaacgatgagtgtcacccttagttgattctcagatattgcatagaactgactcagctttctaatacacctcactcacacataatgaacacccatctgtcactcagtgagtcatcaaggggccataagccatggaccctgcacttcagttgcttacccttgagtagaaggaaggagacatgtacacaaataactaatacaatgagaatgttattggggttataggagagatgcagatgcaaattgtcttgagaacacagaggatgggagtaattccagttgaagggcctgggaagctttcatggaggaggaaccacatgaaatagcttgactaattttgagagggtgactgaaagtcatccaagcctcaagaaggaacatgagcacaggctcagaaatggaaaaatgcaaggaatagttaggaaatctcaaattttcacatgttgtttgaaagtggttttggctagaagagtgtggaagacattttttttaaaaggtgggttggagtcaatttcatgaaattggaggtggggccaaagagtcaccctgaggagtcaggatttaccatgggaggtagtagggagaaatgtcagtttccaagtggtgtgtgatagaatttgacaaggcttgaggatggataccagttgtaactactcttcttgatggtgggatctagggacatccagagtagggaagggacctgatgcaagtaaaagccacagcacccattctcacatttcccctgccttcaattcctgtcatttcccagccttctcatgttcttcatgcttcagtttgtggttccaggtttcctctcttcatacctcacactctctacccttgcacaaactctcttcttcctgttcttgctttcccctctttacttattcttttctttctttttctctttttctctcttgcgtgtgtaagtcgtagtattttgtaaacccctatgtcagatatcctgcttctcttcttacagatcatcctggtctgcattatgaggcccatggaatggagcaagtgttgggagataagtttggaatatttgggggttaatatttttggccacttttttactttctgtaaagtaagccaagttatccttagcttccagatgagaaagcagaagcacagagaggccaagtgtccttcctaagaccacatggctagtaatttagaaagccaggaatctaaacaggatattcctgactaacctatactacgtctttccaccattctagctgtctcctctgagtgtccttcctttgtgcccagagggtaagtttaggcatagagaagtttgaagaccagttacaggtgacacaataggattatggatagtggcttcaaaaaaacagcagcataatgtctctgaatgtgacttatgatgctgtaagttctagaaccctcttcagttggggtgacatgagagtaatcatggtagtggcattgtaaatcaaaacaattgctttggaagccaacgttgcaagatgtacccaaagccacaacattgtttattacctttgactaagtaatattacaccttggaatttatcctagggacttgttcaaaactgaaaatatgctaaatgcataaaaacacattaaaagggaaataacgtaagttttgtttcataataacaataatgaccattttgaaggctttgtggaaaaatgagaatatattaataggttagttgtcaacaaaaaagtagtttaaaatggtatatgtacttgatcctaactctgtacaaaggtctacattttgtccaactacaaagaaatcataaagataggaacagttgtaagaggctagtgtgattatgggtgaccttttctttctcctacaaattatcttggatgttttgtggttttcataatgaaacacatggaagagaactaaggggtgtttgccgttttagggtttagtctgagctgttgagatctccctttccattttggatgatgacacattctggaaaactttctggaccttggggaatttttgggaagaaccagattctttagagtacatcctaatgtagcccaaatgttttcttcttgcattcagaatgcctctgggaaaatctaggatgtggattcccaggaagcattttcagacccttgtggactgttgcttttaagaaatggtctgctctttataatctcttcactaagctccttgctctctgtgtgtgtgtgcgcatgtgtgtgtgtgcgtgtgtgtgcatgcatgcgtgcgcatgcacatgcattttgtacaaaaacataccactttttattccattttcagctgagtgacaatatggtacattctgtttggggattccttggcccatggagaggtcttgaggaattcatgaacacccagatatgaagtggaaatttttatgtgaatacattatatatttctttggagagagtatctaccatttaatcatttcctttaagagttcttaaaacctctaaatttaagacaaacatgaactatcagggcaaggtaaaaaatagaggttactaaactggaggacattggaagaagaaaagagatgagtggctttctagaagtctaagaatcctacgtttagagcgtctcaggttgtgggggagggtggagcagcatccattctccaagtgctttcttcacctcttttctctttatttttttgaaacgtgaggctgatttttgtagttgaacttcttgaatatgagggtgacagctcaaaagctaaaatcattctgtggcttccaacacttgctgctctcccagcttgtaacagatggatttatagcgatgattccatagaatgtgatgcatgagggagttgtcctcacaccagaaaaaaaggcttcgtaatttactttcaaatctggttttgagtgagggctggaaggcctgcctctgccatgatatgaaatggattcccaggaaggggtatggctcagttgtctgacctttacagcatatttaaatgtatattatggtgttcacagtcgtaaataatatagctaaggttatgcacaggggagagctgagggaaacatttgcagtaaagctgtgggctgccctggcgggaagacaggcacttggctttgaactggaatttggaatctgggtggggggagtgagagcaaatattttccaaatggttgccagttgctttggcaccaacagaactaggacttctgaagcagaagaagcaggatacgttctgcttttgtgagttggtgaaggacatcagagtggatcttcatttatccatttaccaaggatttatttagcaagtactatattctggacactaggggctgaggatgtaaagacagggcttttgcttcaaatagtaaacaagaaaatagtggatagaaataaataaattagtataatgtgtaatacaggagaagcatgcatagagcacagagatagcatgaaaaggaatggctgactctaaatgggggcaacagggaacaatgaaaatatggaggtaaatgtatgatttgggttttgaaggataggcattcacctgtaatggatgatgggaaggacattcagatggagggaaaaacatgtgtgaaggcctggaatcaaaaaagagaatgaggcattgagtaaaggcaatttgcagttgtttccatgtaaatgagatggtggaaaccatcagtagataaggagactggagcccatcatgaagaagctctatcagccatcttatgaaggtaaattaactaacatctactgagtatttacatcagttattctactgaatactttgatgtgcacaatcctatgaagcagatactagaattatcccattttacagttaagggagtggaggctcagagaacagagaatgaagtaacctgtcaaaagtcacacagcagaaatggactgctggtaacttgaagacgtgctggtgatagaaatagaagtaaatggatttgagaaatatttcgacggcaaaatcaacccattgattgcgttggctatagtaaaatgagggagaaagcaaggaaagatttaagaatgatttttcattttttgtcatataaaatgggaaggatagttacgccattcacagaacagtagaggttttgggaggtagaacatgggttcagtttcaaatgtcttgagttttagatacctttaggatatacaaataggatttaaaagctgaaatagcctatttgtcattcatctcccaagacttagtgtcttaattagttgcctaagcgttctgtgagttggcaattttggctgggctcagctgatcagttgttctggtcttggttgggattcctcatacatttgtagtcatgcccatgccagctaactggccctgctcctgggggttggctggctgtcagctggggtgctagggaagccagacatgtgtctcatcctccagcaggctagcccaggcttgttcttgtggctaggcatggttctcaaagagcaagtagaaacatgcaatgtctctggagacctggactcagaactgtaacaccattgtttctgtcatattgttttgggcaaaacaagtaaaacgccaacctatatttaaagcctggggtgattgactcttgattgaagctcaagttacaacaggaaatgagtgtggttgcaggaatgtgtgacatcatggccactgctgcagttggccacacctgttctccaagcgggactgctttatagtttagagcacatcttgtaccaccttccagctcttactcatgatgtctccatcctcatttaatgagcattattttgtcgtctgttgtgtgggatagctactctactagttgcttggggatacagaaatgaataaaacgtactcccagcatatgaggttaaggatggtcatgtagcctgttagtggtgaaagtgaagttgctcatcgagccacagactgtacacagtgtcctttatttgatgttctcctgatgtaaccatgttgaagcctcagccccctgggataggggctgcttcctggagctttgcatgaaatgtgtcacccaccagtgggttggactatttctgaacatgcttccgacagaaagcatgttcttgtttaagcagagccatatgccacatcttgaatgttaaaatttagccaccactgagtcatctagagatgaaataaaggttatgagattttaaaagcagaaataaaggattttcacctctatttttataatagtttttttctgaatataaaagaaataggagtatctgttgtaagaaattagaaaatctgaaaacatatagtgagggaaacagaaatggcctgtcacgcactggagattatgttaacatacgtgtacatttattttgtaaaattagatgaacactttatataaagatttatatttaacattgtcatcatatagtgtgtatattttttaaacacttgttaatggtatatgtactgttttatggattgcattttacacttaacattatacaagtagacatttcaatattgtaaagtaaaatgtagaaatataatttcagtctcatcatattaagtagtacagtttaattatatgattatttggctgtttatgttgtttctgataatgtgctattataaataatgctttatgaccttcctgaaacctaaatcatgtgggcatctgattatttctgctgtacatagtcttagaagtggaaatactgggccagagggtataagtgtttttaaaagatttccgatagatattgggaatttactttgctgaaaggtggtatagcagttacatacttgtcatctgattttctttgccttgagaactatctgggtggctattgtggaaactttcctagcaaatatttgtttatttattgtttccttcattcacttattcatttattcagtaaacatttatagagcgatagtgcctagggagaaataaaaatgtctgagacagatggttacacaatatcatgcatttttcaaaactcatagagatgtataccacaaagagtgaattgtactgtatgtaaatttaaaaaacaaaattctaaaaatgattaagaaaagcccattgcttcaaggaacttaaaatccagggaaagagataagacatgcacgtaataattataacacaaaacaacatattaaaagtaccatataggaagggaaaatatttactggtacatttcgtgtgccaggaactggaccagatattttacacattcattcatttgttcatttcctggcaatacaaagatgaaaaacctgagtgcctgttctcaaagaggtcccagcttcatgggagtgggacctgcaaacaatcaaccaccaccaggataattactctaagttgcacatgcaagagaacagaacttgcctgagggagttgaggctggtttctgagaagagagggaacttgccaggagacatgaaggaacacagtgctttgcctcatttactcctcacagttgcctggtgaggcagagctttcacacttattttacacaggaggaaatggaagctatagagcttaagtgaagtgtcttgccgaaggtcacacagctgaaaagtggcagagccacaaattttgcctagatatgtgctttctgtcctagtcactagatccctagaaagggactggaatttaggataagcattgcaggatggggaggaagtagctctggagtaagccaagagcagcatctcatggggagaggttcatacgcagggagtcaggtcagagaccagaggctcatttagcggagcggtgcagggcagatgatggtggcagccagatagcagacagccttacattctcggctgaaggctatggacttttgcaggcagggaaatgattgatgttttgagaacaaaggaatggcctgccaagagatgtgcatcagaaaacatcaatctggtctcaatatatgttatttgggtgatggataccctgaaagccctgcttgactattatgcaatctatgcatctaatgaaattatacgtgtgccccatacatttatataaacaaaaataaaaggaattgacaacctagaaaaaacaaagaggaatgaataaatggaaatgccaaagagaaaaaaaataacttggtagtagcaccctgaaaggatccagatgaagggtagacagagatttccatctctcttggagaactctcctgttcagtggtagcgcacctagaatgtcagagtaaggacacagtgcatcttagtccagtgatcacttccccactagctaggccccatccttagttattcccaagattttgtttccttattccagcagttgcgtatctaaaatgtcagagtaaggacgcagtacaccttagcccagtgatcacttcctcactagttaggtccatccttagttatttccaagattttgtttcctttatgaatcctgtcaaaatagtagacaaactgagacctagcttttgttgtattatttcagttaaagcaaataaacaaaacctcttctactcaaatattatttcctttgccttttctacctctacttccagctggcgattccaaaaataaaaagctttgtttcctcaaataataacaatgcacaatgttggaatattccagtgagtcatacattggtagtcacacacagggatgggggcgactttaacctgaaaactccagcccctaatgggcctttcccattggaaccaggttttactcttaagggcctgggtggagcttgggccctaagtgtgggctataagcaggggctggatgagtagacagcaaggcagtgctgtggagtctagcttggaaaggtaaacatccagagccagtagagctcaaaagctctcaaagggtaaccagagcagtatttggaggaagtatgcaccagtttcatccccatgtccttcttgaaggggatgctgtgggtggatcatgggtatatggattttaagtctttaagaatcagaatgtagagcccacctatttcttttctgtggcactgcaatttgcccccagctctaacttcaaaacacagggccttggtctttagttccaaaatcatcttaggatagttttcttactccatggcctactgggccctggcctgcttcaccattttttcaacttcatctcagatttatccaccaccctccaggctccctgactttcctttggtctcttaaatgtgccaaagtattttcagcttcagggccttcactgctgctattccctgtgagcacagtgcctttccttttgctcttcctcaagtgaccagacagttcccacgacccgttcatcatctgctaagggtgtttgtgacttcacattgtgaaaggtatcctcactttattattctctaattcaggaaacttcattgcaattagagattatatatttatttttttgtttagtttacaagactcagtcacccctacgactagattttatgctccatgaatttagggctggcctgttttatgtactaatatactaatctacatactcagttcagtgatgggatcacagaaggggcttcagtaacatttgtggaaggattgaacctgggtcatttccttaccgtagccttagcaactcatttccagtgtgctgggtgcatgtataggacagaacagggtggctctctgctctacagcgttgggtctaatggcctgtcccacaccccttagcctctcttcatgggttggttggagctgatggcgccaaatgagaagatcccactgaagatgctccaggggctggcaagaatcactttaaagaaaaataatctatctcttccatgaaatgaaaatagtaaccaggacgataatgttttcatgggtttgagaaaaaaaaaatttcttccaccattgtcgtgatcattttggaaattctaaaatctgtttctctgggcaaagaaaaaatttatctcactgatgaagtatatttaagggagttttcttttctttctttttttttttttttttgccagggggtgtggtctttaagaatagtttaggaagacttatgtttttttccccctattccagagtcactttgcaacttaagtagaaattcgtatatgttctctcatctcttaatcatgcacaggctcttctagaatatctcttacctgaatagcttctaaggggctagtcactcacagcagtggaatgggcagtgtttggagtctcaagacacaaggggggagttaaatcagctttcctttttgtggaaaatggggttcagtgacctgccttctgtttcctctctctcttcctacctgcagtgagtagtattactagccttttctatattctttccctccgatcttcctgctcttctttcccactccaaaggcacatgccatgcaaaatatttgaactagaccctcctccaaagcccagcttttacactgactcaccctcagcaaccctgaactaagactccatgtttcaactgtctttgtcattcctgatcagcatgcctctgtgccttcatagacgttgtcccctttccctggaattttgctccattcctatctcccgccaatgcatgtctctatgtgtcagacccctattcatcctctagaactcaacttggacatcaatttctcctcctggaagcctgccctgattgtcaaattctgttcactgacagtacctcacgctttcccagacactctcattatattgtcataatatgtttacacatctaactgactaaatgtgaaatactctggaggttgggcaggactgggtcaaatttatcatttgcatcattaggacatagtagataccacttattaattaatggatgtggagagcattttatttgcttcaagacctatgccaaaataaaacacagcaagctaattatttgtacttcagctcccatttttaagtcttctcacattattatatattacaaatataattggtagttaggatccttcctttctgtttatctttattgtcaagtcctaactgagccccagtgtgtgaatgagagcctcaaagatgctctctgtggatagaagtggaggaagagggaagacacaatccctgttctcaagaagcttgcagtctgaaggaggagaaaagacaaacagcactgatggaaggaggacacctgtgcgtgattactgctgttctgtcagtgaaaccccagagatttacagtcagttatcaccactgtaaagaacaatgtgaaagtcagggccaggtgcggtggctgatgcctctaatcccagtacttcaggagaccgaggccagtggatcccttgagcccagaagtttcagaccagcctgggcaacatggtgaaaccctgtctctactgaaaatacaaaagtggtggcacacgcctgtagttccagctactaggaaggctgaggaggtgggatcacttgagcccaggagacgaaggtggcagtgagccgagatcacaccactgcactccaggctaggtgacagagccagaccctgtctcaaaaaaaaaaaaaaaaaaaaaaagtcacccactgggtatcttggagcataacattatcgggcacatttaaatataaataaagatttgacattgagatacaaattcaccacactcctaattattcaaaaatattattctatcttgattgtcacccatatacttttgtgcacatgggaaatgcacccatgtgcatttccacaatgacatactaaatagacacacttttttttaaggtaggcttcaggcaaaatcaatacataaaacaaaaacagtttttcatgatgcatttaactttataagatataatctcattaataccaagtgccagtttatcagtggacacatatgtattatttctatatagctgtaataagaatgagcatactttttgctgtaattaataacttctgtatattcatacgttttttccccataagaccatgtagttccagttttcaatttgtagtaatgatatagaatctatcatagaatatgctattaattgcttgaatatgtccctgctattggttatttaggttgcttaattgctttttctccctgtgagggatagcactgttataaatatttccatacaaatagctttttttctttttcgcttttgaattatttccatggaatataagagtatattacctaaagtggacttagcaggttaatgggcataaatagctttgtcattctgccagaatgctccctggcaggtctgggccagcatacagtattcgcaggaggatatgggaatatctgtttctttataatatccttaaatttcataactttgaaatgaattttcactaattcaaatggcattttggcatttcagaaatgagttaatttgcttttctttaatctgctgaaagcaagatgccaggccttttttcagcattggttcactctctacttttcttcatgtataaactacctgtccttgtatttcagagatcatcctgctttggtgggtcttagactaaccatttgttaatggttatcctttctgatataaggaaaaatagaatgtgccttatcactttgctaattatttttctttgtcctgcagcatattttcacattacacaaattacacctatcagaggtacacccaagtgcaggaagtttgtggttttagtgaattagtagctattcccatggagccagtcaggggctggcgtctgttcagcgcaccttccagactcatcagacttttaaaaaccactttgtggtgaggaaagagggagggcttggaggtcccagctctgctgctgtgtgactggggaggttccttagcctctttgagcctgagcttcctcagctgaatcattggaaacaaaacctagcttgcagaatcatttggaacataagttggtgctgcttagagtggtctctccttactttcacttccttctacttgttccatccttctctcctctctctttaagaccaacagggaatacagctgctagagtttggagggaggccaagccttcagcccgggcacccaagaattcaccatgcccagagcctgtatccaccttcgtggacccagcttcctggcttctggggcaccacagtgtctgttcccctcaagcccaaaggaagtttgttgtttccaacacccagacagcctcagtactttcaccaacttggaagcggtggatctacagtcatcttgaaggggcccacactacttatgagcacatttcatgagagacctggccaaggaggaagatagggcccatggatttcctttccaggaaattaagggaaactaccccttatttagtacctaataagggctgctgacacattatctcaattttcaattggcaatcataggagtcactgtttttttccttttctcctcccttccctgcctccctcctcccccctcttccacccttctccccttcctccccctcctcctcctccttccccctcctcctcccccttccccctcctcctcctcttcctcctcccccttctccttcttcctcctctccttcttcctcctctccttctccctcctctcgcttctccctccccctccccctcctcttccgcttccccctcctcctcttctttccccctcccccctcctctcccttctcccctcccccctccccctcctcctatccccttcccttcttcctcctctccctccttttctcccctccacctcctccttctctcccctcccccctccccctcttcccctttcttttcccttttttccctcttattttccctcccctcctcctcttccccttttttgttggcaggcaagtgagtaagggggtgggcagatgaagaaatcagtcaggggggatcagtgtttttgctcgtggtcccacaataggaagtacagagctaagatttgaactgaaatctgtctgaactcaaagtccacgtgctttctgccaagcatgctggccctgagattatccctttccacctcttagaagctttccctgagctttctaccacacattaccttccttcgcgtccatctttctttgagatttaccaatcatgtcaccaattgaacacttctcatttaatgccttgaatgattaaacatgtttggcctgcaggttgccctatctacgtaggtctgtatacacacacacctgtgcacacttggttagtcaggacactgctgtgtgttctgctccaggaaactttcctactggctcacctcccctcacttctttctgtaattcatgtgctgagctggtggcagttgtttgtaaatgtgacccaacctcttgacaaaagtgcatgtctccaggagtgtgtgtctgacccaagttaagccaattggaatcccttcctaggaattggaggttaggaacaagagagagcacaatttttcttctctttctttcttctcctttcttccttccttccttccttccttccttccttccttccttccttctttctctcttttttttttggagctggtcctctagcatgtgaatcttaagaggtggggagggcccaaggggtgccaggtagactcggggagaggtggatggagcctcccttcaaaagaagagatatgaagagggtcccgtaggctcccagtcctgcattagtcctttcctgagtcacagctgcagccctgtccttggctactacaggatcccctgcttttctgtgcctccctgtactctgagcttatgtcagttccacagggccccttgcttgtcttcagaaagattccaacccctgttgccctgggttctgccagctgaatgtgggattttctgattattatcaacctacctgaagagtaatcatgggttccagttgggaaatttgcagaggtgtgaacttgaaccatgcctgcttctaagctggtgtgtagggatgagtgcacttctcagtgggcctagctaagtacggcatgcatgaccgtgtgggactttttgttttttctgctatttttttacatggtagctttttgccttatgataaaaacaaaatgaagtgaaacaaaactaaattcagacttaataatatccatccaagctggagataaaatgagggaaaatggaaaaggttaaataactaggtcatgtttcttgatggaaatgtgattggagaaaaggccaggggggtgacatactttttttgtatttgaggttttgtggatttgcaggaatctcaatgtcacttgagaactctgagggggtgcacgtcagtgtgtacaagattcacctggatagcctataaaatgcagatttccaggccctgttcccagagtgtacataatgcatgaaagatagggaccagggtctgtgtttttaagtaagtttctcagatgagtctggctcaaggggtctgtgagtcacactttgacagattcttacctgttgtatattacattgatctgtatctgtttgtctgtctataggttcccatgtatcttcatctctttctctctctctcactctcccacccacacacatatccactctttcagtaagctcctcacatctcctcctctcatatgcccacaatacccgataaatcctttgcacatttcatgtgccaggtaaatgcttgctggttctattattcctcagctgttattctgggatgaacttttccttggagcggggccacacccaatactatccacttggacccttccatgtgctgggcagtgggaggcaggtgcgccctttccctttccccagatctacctcctactcacatgcaacctactcatttgagtcaaaattctaattttagaagaaaactagggcctgacatctaagccttgccaggtgcatggcctggaggaagagaagttgagggctggagagtagctcaacagctgagatgtggaactcaggttttaggagggtggagaggcaggagggaaatgcagaaggcagtgacgtggccttcacttccagagccaagattgctcatgcagctatgaaatcaaacctgccgtttattgtgttttccttaaccactgggtttagaatggaaagttggcttgaggttgagtctctgatcttatcttgaggatgttgggtttactttaaacttagtcttaaggagattctagtggaggttctcatatgcaccaagctgtcatggtaacttcaggggtgccaaaattgctgccttaattgacaccctctaatcagtaaggaggtggaatttgaaacattaggagggaacagattttttagggtaagaatatattaggtgctgccatttacgtgtcgtgggattttgcttggttacctaatctaagtctatttcatccttgaataaaatgggaacaatagtaatcataggattgttgcaagggttaaatgagaaaatagatgtaaatattgacttctggtactacttgcattattgtcattaactggaatttatcaactggctaacatttatcctataaatatttacttattaacagatgtttataaacatctactatgtatcaagtagggttttatttatttatgggtttaccaattcataacaaagatcaagaggcaagaaaaaacagtaggtcattcattctgaagatactttttgaacacctactgtggattaggtgtttgaagcacctactgtgaacaaaatgctctgcttttctgcagccctgtgttctgtttggtcatgcctaattactcttttaattgtaaaggattgagtttgtcaatattttatttagaatatttgcatcaaaattaaatgtgaactatttttgactccccctaaaataaagagactcaacacttgctcttaaatatctcacagtgtagtgagagaagataaaatattagtattacaatacaataagaagttgctgtaatgttaggatgcatcaacagtcatatatataaaagaaggagcaacagaatctgtcttgagaagtcatgataggccttggagaagtgattttgatctgaggcttaaatggtgggagaagtattttaagcacaacaggaacacaaatgggttgaaacagaagaaagattgattgactgattgaacagaaaggactagatgtttatggcttcatggcaggcttgatccaacagctcaaatgatgatgtcgtcaaagacttagattttcttagtatttgtactccggcttgtgcattcttggctgcatcttcgggttccacactgtgtaccttcagcaacttcaggcattctctatactctgttggttgaagcagtcacaacattttgaagggaggaacatagaccccacttctcaacagagggtgcatcagggtcacattgtaaggtaagcatgtggaatgggagataccagaaaatataatgggccacagatggagagatgagtgtggactgtggtcatgagggataactccctgctggggacagggcttgagctgatgcttaaagagtggatagctggaagctggcaggcagagaagggcaggaagagaacatgtgcacattcctggggacaccggtgagggtttgtgttcctttttgggtcttctagatgcctccttactgcccagagcaactaaataggctaaaaatggagtctgttgctaccatctatctgtagaagaccaaagcattcagcaatttcaaagcacatggctcctttttggtgtcttacatattcaacctcaggtttaaagtcccctgtgcccagtaagttgatcaggcttgataaaatgcaaagccatttctcctgacttctccctttgttttctcttctattctggggtacgaggagcctctgtaccatgggattggaagactcaccaatgtctttgagttggcacaataagtacccttgttagcacagaaatcacattaaatcagttatgtgcttacttgcctgtctgtcccccattatgctgagagtcttgggagggaagaaactgtgtctaacacattccagattctgaagcagagccaggtacatagtaggtgctgtgtacaaggttattggaataaaataaccttgaatgaaacttcaaggttgaatgacagcagtgttcaacacacctgggcactttcataccatctcagcctactgcaaggtccacatttgtttccaccccttattttttattccttctcttagtcctggagtctgaccagctcctctgtgattcttatttctctagatcaggaatctgatctgtcctcagtttctgtatctgtatctgacagtcaggtctcagaactgaggccttaattcccaagcacacgttgtctgtttcttatcatggagggagattgtttagaccagagtcaacacacaagaaggactgccgtgtccctttacccttttccttggcaagttttcctggcatgaactcttgctgtaactaagatatgtgaggaacttacttttacagagatattttgccaaagataaatttctcaggactgtggccatggattcttagcaaaaggaaggacaaggagatacgatcaaatgtgtgctggtgaatcaatacaaataaattatgtgttctttgttattatgtcctaggctacatgagagagggctcttaatcatccaccatcagccgctggaggttctgctcctttctcaggagttatgtggagacaaacccaggcatatgttattttaggcaacccagatcactttctggtgggaatattggtgaggctgctaaaggaatgctagcctctgcaaaagactggaggagagcaattcctctcagagtctggcatggccctcaatacgctctaagtttttctacctctaatgtccctgggatttatcagcactttcctgcttgaatgaatggtcattctgctgtgatatatgggaccaatctctggcgattttaatcaagtatgtgactaagagcttggacagattaaaatctacacctaccccaacttcccaccatataaatgaggtggctctttatctcttatatcttgggatgtggctgccatggccctgttatctgccattctgggctaggacctagaccaaggccaactcaggaagtacatgcattctgggcaaggtgagatccaggtaagcagtttgtaaaaggagctaaagaggtgacgagacatgggggtgaggctaggagatagtaatctaggaaaggagcctctccaaaggcactggacaggcagtaacaaacatgcctgcagggccaataggcagatgagtaacgacaaaatagggcacagggagaacctaggccatgagcaggtttccaagacagggaggatgcacaagtttggggaaataagttggaaaccaccgcaaccaacctggagcatgaaatgaggtttaggccatgggaacacttagatggtcctcccctatgtgttggattggagctggatctcaaacctagacttgtgattaaaatgaattatactaacttcttggatatctctgagacaccttttttttcctattctgttccatttgcagtttttagcgacaactttttcataagggattccctcccacctcccttctctcctttcccactgccattgcctcagttcagatttcctacctcttatgtttggaccattgcagtatccttctcactaggctttctgcttttcatcttcactgatccacccttcatactcctggccatttcatttccaaagtgcaggtcctaaaaggtcactgacttattcaagctcattagacatcttcatggtatttaatgagtcaagtcaaaactctttaacttggtgtagttggcagaatagtggcctcccaaagatacccatgtcctgatctctagaacctgtggatgtgttaggtcacatgacaaagggaaattaagacagtaggtggaaataaggtagcagtcagctgagtttaagataaagcgattgtcttgaattatttggctgggtacaatgtaatcatgagggtccttaaatggggaagagggaggaagaaaagtcagttttcagagtgatgccatatgagaaagacctgaccagccattgttggctttgaagactgaaggggaccatgagtcaaggaatgggggaaaagaaaactgtagaagctgggaaaagaaaaacaacagattttcccctagagcccccacaaggaatgtagaacacaaccctaccaataccttgattatagccagtaaaacccattttggacttctggcccccataactgtgaaatgatacatttgtgttattttaaattcgtggtaatctgttacaacagcaatagaaaatttacacacctggtatttaaaaccactgttatttggccccagtagatatctccatcttcttctctatgtatgtgaagctctagcctcagaagacaatgggtagagtgtctccaacctagtgtaagtcagaccagtttcaaattttttttgcaggaagttgtataagcatgtatctcccttcttgcactgaaagtgccttaggtcaggaactttgtgtctctcatccctacatccccttagtaccaagcatgatgtgttgcctgtaagagagactctgttgtaatttgtaggattgaataggaggtgggttgtgatgaatgcccaatcatgagttggtgatagggtattcacttcactgttatttacagcagtggtgctgaacgctgtcccgggtgctggaggtgctgagcgctgtcccaggtgctggagatataactgcaaataaaacagatgtgttgatactgaagcatcttacagtctagccaagctcctgcctttgccctcatccgaagcagctgaggctagtggctgcttccagtctggagagatgctgatccccaggaaattcactggagtcagcagctgaaattgtttggctgggagctcttttagctcctgagacccaagagggagcactgcccctgacagaagctccagaagaaagggaagtgtgtgtgcctgcaggcaggatcagcagagacagcccctgaaatgaaaagagacaagagggttggatcacacaccaggcaaaatgaacttggatggacctgtgatcttcccatcgcggaggctgtcagtgcgtgtccacacaaagcaagcattggcatgcagggagttccaggcttttatctctgtgtcagtgagaggcctgatgaggttgctctttattttgtgagcttcaagttgtcaccactaaagtgacatgccccttcttgaggacatggcatttcctcactcaaatggcaaatgacctggtttgctcagagacagggaaaaaggaaggaacctaatgcatgctgacggcttactgtgtgcctggcagtacaataccctttagctgatcctcacaacaactgaatgaagggcgtgatcttggctaactttagtatgaggacactgaggctcaatagggtaagcccctttcctaaggtcacacaaaataagtggcagaccctggattctacactaaaactttctggtttaatgctttcactttttctcaaagaaacagatcacttatattaatattttcatttgtgttaatgatcatctctggaggtttcacattagtggcattgcagccagtttcctcttccatcagctcacatccgtttctgcccttggctgccttctcagggtggttttgatggtggttggatggatggagtaatggacaggcagaaaggtatgagctcagactcctacctaatggtacacctttggagagaattaagccgtggtctggtgagatgttattatgggatatagaaattggcaaggaattgtgtggtcatttagccccacccctgttgctgcgctgcatgctacctaaatcatttccaagaatggccatctcattttcaaagtcccttagggaatgagagtgaatggatttttaattcatttttaatggctcgttacacaaaaccagaacaaccccccactattcaacagccatttttcacagtctccttgtttcaacagcattgcgttttcatttccttgatttgtcacttgccttattcagttaccaaattctgcaaagtactttcttaacaatggcccatttttaagtcaggataactactgcttgttaatttctatatatcttatctctcccttggatccccttggaatagagaaccctgtgtttgggtgctgactcctgcctcttcctacttgcatgagcgggacagtttccttatctaggcaatggggataatgctatctcccttttgtcatagttatgctcattatctgtgtaatacacatcaagcatcaagtacagtggttggcacttagtaggtcctcagtaaatgttagcatgctcaccttggcccttcctgtatttgttcctctcttgtataaactaccgtagtttaattaagttgtgattttgtctggaaatttagtgttttctttcatctacaccccattaggtacaggagtatacacacatatacctcagagatattgtgtgttacagtccaccacaataaggtgaatatcacaataaagcaagtcacacaagttttttggttgccccatgcacataaatgttatgattacattatactgtcatctattaagtgttaagtagcatcatgtctaaaaaaatgcatacttcaagtaaaaatattttattgctaaaaatactaatgattacccgagcctttagtgagaaatcatcttttttgctggtagagggtcttgcctcaatgtcaatggctgctgactgatcaggtttgtggttggtgaagattgggatggctgtggcaatttcagaaaatgagaccacaatgaagtttgctgcattggttgactcttctttcatgaaagatttctctgtagaatgtgatgctgtctgatagcattttacccacagtaaacttctttcagaattgaagtcaatcttctcaagccctgccactgctttatccactcagtttatggaatagtctaaatcttctgttgtcatttcaataatgtttgcagcattttcaccaggaatagattccatctcaagaaactgctttcttttctcatctgtttaagtttaatcatgagattgcagaaattcagacacatcttcaggatccacttgtaattctagttctcttgctatttcgaccatatctgcagttactttgtccactgaagtcttaaacccctcaaacttatctatgagagttgaaatcaatctattccagactcctattcatgttgatattttgatctcctcccatgaatcataaatgttcttcatgacatatggaatagtgaatcctttccaggcggttttcaatttactttgctgagattcatcagaggaatcactgtttatggcaacatagttttatgaaatgtatttttttaaaaaaataagtcttggaagtgaaattactccttgactcacgggtacatgatggatgttgtgatagcaggcataaaaacaacattaatatctttgtacatctccatcgtagatcttgggagaccaggtgcattgtcagtaagcagtaatattttgaaagaaatatttttattggagcagtaggtctcaacagtgggcttaaaattttcagtaaactgtgctgtaaaaagatgtgctgtcatccaagctttgttattccatttatagaacacaagcagaggagattgagcataattcttaagggccctaggatttttggaatggtaagtgagcactggctttagcctagatgagttatcctgtcttttgaagctttgaagccaggcattgagttctcctctctaactatgaaagtcccagatggcatcttcttccaacagaaggctgttggtttacattgaaaatcgattatatagtgtagccaccttcattaatgatgcaaggtagatcttctgaaaacttgctgcagcttctccatcagaacttgctgcttcactttgtacttgtatgttatggacatcccttcttttcttaaacttcatgaaccaacctctgctagcttcaaacttttcttctgaagcttacctctcttagacttcatggaactgaagagcgttagggccttgctctggattaggctttggcttaaatgagtgttgtggctggtttgatcttctgtcactaaacctttttccctatcagcaataaggctgtttttcttttcacgtgtatgttcactggaatagtgtttaaaatttccttcaaggacttttcctttgcattcagagtttggcaaactctggcacaagagacctagctttcagtctattttggcttttaatgggccttctttgctaagcttaaccatttttacttttaatttaaagtgtgagatgtgtgactcttccttttactcaaacacttagaggccattgtagggttgatatttggcctaaattcagtattgttgtgtctcagagaatgggggcatgtgggctgaggagaaggagagagatggggaacagccgatcagtggagcagtcaaaacttgcacatttgtcaattaagttcactgttttatatgggcatggttcatggtgcccaaaaaacaattacaaagtaacatcaaagatcactcatcacaggtcatcataacagatataataataacaaaaaagcttgaaatgttgtgagaatttccaaaatgtgacgcagggacacaaggtgggcacatgctgttggaaacatggttccaacaggcttgctcgacatggggttgccacaagccttccatttggaaaaattaaaaagaaaaccacagtatctgtgaagtgcaatcaagtgaaacacagtaaaacaaggtacctttgtcttctctagtggcccttagagaatgataactctttaaaacttaatatggtctgatttcgggagattgctttcattatcttcccaccctgctcctgtgtccctttctccttaccctgttgtggacattctcaaagttatttcaaagccaccttgagctctcccttctggagaggcttggcagactaacttatctaaggaaaagaaatccttgaaagacattgctcccagaaaggagagggctgagagtttaaactttttccatctcttatgatctcatcaaagcctctcatccactgtgaggatgtcctgaccacctcagctcagattcatcgtctcctcctttgaacacctctggtaatactttaaactcaagaagtgtgttatatctctgttgattaatagatgccatatcaaagaaacatttaataatactttcatagtacaatgatgagaaaatcagggttcctgtcctgaggaagcatgtaacctagagtcagagatgcatgtgcagatagaaaattatagtctggtgagtagcaaaattggaggtatgtacaacaagttaggggaacatagattaagggaaaatcagttctgtctttgagaacagctgagacatcagagtgttgatatttgagctgaatctggaagcatgagaaggaaggagagcatcaggtagagaacaggagaagggctttcagaggagggagaagagcataatggaaaggtacgggaaagttgaataggagaaggggtattctagtatggctaaaattcagtggtcatttgggaaagtggctctagaagaggtttaaactgccatttggggccaggttgagaaagaccttttatgccatgaggaatctggattgattctaaaggcagtgagaagccactagagaatttttgtaagaaattaagtaaatgagttagttcaaaggcctttgaggccatctagtagccaaatccaatggttgatttttgatctttcttgtaaataaactgtcagcagtatttcactttacagggatctggtcaccctcttccttgaaatgctttcctcactcggtttccagaacccatgttctccttgatatccttgtatctcccagcctgttctgtgtcagccagggcctctaactcgagatattttttgattttaattttattttaagttctgggttacatgtgcagaacatgaagacttgttacataggtatacatgtgccatggtggtttgctgcacctgtcaacccatcatctaggttttaagccccacatgtattaggtattcgtcctaatgttctcctttgcctagccccccaacccccgacaggccctggtgtgtgttgttcctctacttgtgtccatgtgttctcattgttcatctcccacttatgagtgagaacatgcagtgtttggttttctcttcctgtgttattttgctgaggatgatggcttccagcttcatccatgtccctgcaaaggacatgatctcattcttttttacggctgcatagtatttctaaaagaagagattgaatacaggaattgaatacaagagtgctggaaaggctggaagagcaagaaagaggaaaggcaaggctgctcaaagatcggtcactgcaggaaccatcacgtgactgcctaggaggagaggaagcagtactagaggtcaagggtctctcccacctaggttcctgctgtgtgtgctgaggtgcatcagaagaacccaggagcctgtgctgctggttactgagacccatccccattgcttccaccacctctgttgctgctgatgtgttgtcacatcagaagccagatatgtggagagggctgcttctccctcctccgccagtccccactcatgctttccattggctgaactaatcttgaagagagctcacaggagagttttagaaatgtaatttgcagagccctggttacctgccatacataggcaggattgtggggtgagagtaaacagcacagcctacttctttggctattgtgagtgttcttttccaccctcctgtttgtatttaaccttgtgattctgcctaatataatgcaataacttcttttttttcttttgaggcaaggtctttctctgtcacccaggctggagtgcagtggtgcgaatgcagctcactacagccttgacctcctgggctcaagtgttcctcctgcctcagcctcccgagtagttgggaccacagatgtgtgccaccatgcccagctaattttttttaattattattattttttttggtagaggcaaggtcttgccatgttgcccaggctggtcgtgaactcctaggctcaaatgacactctcacctcggcctcctaaagtgttgggattatagattataggcatgagccactgcaccaagccacgacaaattataccatgaggatactgtcactctctatcaagaaagagattcatgaagttccattagttgctaaaccttctctgggtaatgttaattgctttgtagacctattacaatcctgtgtggatatcttataacccaaagtagttgtgaagctaaccaacactaacgttctttgtataaaagaaaagaaacagagagagagtaggagaaaagagagtaacttatgggcaccatctatttatctgttttgccctgctgaacctgtggctggaattaccccaaaagtgatggaagggaagttcccacaagggagtgccccaaacggtaccaagatagggccagttgcgattccaaagaaagaagcactaaatgccagggtgatcagtgcaaagcatttattaggggaacttagtatagtgctgcagcaatcctcatgacagacagcaagagaaaaggggtgatctacctagatctgtccaagcaacgtggtcagggaaaggagtttatgagacggtttaaggcatttagctcagggccaggacctctttctttcagtgttttgggcaacaacctagatacctttaacagttcctgggaatgttcaaaagaccagtgtaggttcaagcctgctggggaaaacctgcaccttgctgggtcacagaacagtcaagcactctgatttttcactcagaacacagaaagcaagtaggtgatgggggaggggggtgtggaatagggaatcctgcattctcactcatctctgtgcacacacattctgagccttctctcatctctgtgtatgtgcacataaagcaggcaaggagaaatatgcgtaattgctattatattcatttctgttactagtcctgaggcatagttgataggccatgtctttttcagctacccattttgtatttcttttgcccttagcaaatacctcagagggttaaggatttctacctcatagtgtgatagaataattcaaaccgtcatttctgaagaatcttagtccttaatagttctgcctttaccactgtagtcttccgttaacttgtacttcaggacttgaagacaataggggcacttgaaattaataagaggcataataataataataggtttcagacatcattctctttgtcctcattataaaacatcatctctgtttctccttgacaataggaacaaatcatcccagctggtaagtaaccccttcattacctgtttgttcagtggtagcatgagaagctcaacacagatggatattcctttcagcttccagttcaatagaacaggtgtgaccgggcacagtggcacacacctgtaatcccagcactttgggaggccaaggtgggcggactgcctgtggttaagagtttgagaccagccttgccaacatggtgataccctgtctctactaaaaatacaaaaattacccaggcatggtgacacgtgctcgtaattccagctactcaggaggctgaggcaggagaatcgtttgaacccaggaggcagaggttgcagtgagccaagacagggccattgccctccagcctcggcaacgagagtgaaactccatctcaaataaataaataaataaataaataaataaatgaacgaacgaacaggtgttttgcctcttggtgacagttccctccttgggaagcaatacttctctgctaacagagccccaagttgtggggacatgatttaaatattctgtggtgtcctcctggatatgataaggagagacatcactcacacttttcattgttgatgttcagaccttggtatttggaccatattttggtgggacccacatcctagaggataagcaccacagcctcacatgggtgtcagctcccagatggtggtcattgagttttcacaagtccactcaagcattgtatcagtccaggtgctctgggtgatcatgtttatgataagaccagtgaattccacagacatgcccatgactgtatttcatttgctgtgaaatgagttcctttgttagaagtcatgttgtatgggacaccatgacggtgactagcgcaatctgaaattgaaatgtttgattctagcatgatcactacaggaaaggaaagcaattccagtgagaagaaattgccttctctgagatgagaggggtgctgtgcaatcaacctgccaccatgcacgatgttgagactcagcattggtttcttatgttggtagattgggaactcagcagtgattatttccacatcagccttggtgggggagattccatggtgagcctaggggaagcctcaatctctgccacaatggccattctatacaggagcccacagagcagacacaggggtaactggggaagaggctcattgatctcaacagaagacaccatcctgtccatctgatgcttgaaagtctctatagtaaacaccacgtggtgagcattcatacaggacacaaatatcccctgtgccaatttcgagaggtccaaacaaactggtttttctgcctcgtttcactgatctctaaatgctgacatgccccagctgtcaatccttatagctttagtcaatccacacttggtctcttagtgactagacctagactcatgtcttacaagtccatccaatcactgacagctcccaaattgatatttgtagcctaaactctcttctctgaaccccagactcatttatccagctcagtgtttgacttctccatttgaatgtctcttaggcatttcgaaattaatgtctaaagctcaacttttaatctttcctccaaaccttcttctctcacagtcctcgtctcataagacagcaatttcatgcttccagtcacttaggctcaaatgctgagggttgtccttgactattctcttttgttcacacctcgtatctaatttgtcagcaaatctccttggctctatctttaaaatatatttagatcctgcccctcttcacctgtctccccagtccactgctgttactctggtccagtctacactgcatttcccctggatgattacagtaggctcctcatccactctcgtcccctcactgcctttctaaacacagcaaccagagtgatcttgttaaaacctaagtcctccatgtaaatcctctggtggtttcccatctcactcggagtaagtaccaagattcttacagtgcttctcaaggcccagtgagatctcagcctcccaatatctccctcacctcccctccagcttcattaacttgttgttccttggttacgctgggcacattcctgcctttggatctttgcatctgctgctgcttctgcctgacatgtttattaccaagagcaccatgtgacttcttccttcacctcattcaggattttaagtgtcagtttctcatagaggcctcttctgaactccttatttacttttgcaaccttcattccccacctgccacccccccagcccaccctggaaccacccctgtgtgtttgcactttttaatgtatttctcttatttcttatttcctgcttattttttccccacagtactcactgccatttgactactgcatttgttacctattttttttttttcctctgctaggatattatcttagagggggcaaagaggctggtttgttttctttactgctgattcagcacttggcaaaaaggaagcatgctatacatattagtttggtgaatgaatggaaaaattataaggacctgaaattggtcaatgtagtacaccccaacacatttcaggagactcggtgtttgcttgctatgggcaagatgagaaaggaatcatgctgagccacagagttggtaatgctcccttaaaaaaaaaacagagaaaggggttaacagttttgtaaaatttcttgcatcagtcactgacaagttggtgtctcttgtactattaataattccttgtcttcccaactagattgtaaactcatgctgtgcaatgggcactgtttgtcttattctggacacccagttggtgtccagacattctcgtactgtgggtcagttgggttctggactctagatgtttaatttctactccctgcaggggaggctcctctaggtgggaggaagatgccaagactcacaagactatgctgagacttaaaatacactcctgcaggcagtccccgaagtgtatgttttagcaactttcttatgttaccattgtctaccactcctggtaaagaaagtcagtgagtcctattccacttggctgaaagcaaagaattatcaggtctaggcaggagtgaggtcataagagtgaggggacctagaggtggatgtgcagagagccccatggatttaaaggcaccaagattttaggaaggtttaatgaactaaagtaattttccttcagagtaaaattttacaggcattaaaggtcctcacttcactgaatgtgctcacaggccagagcgtcctagtgatttatgaatttgcagattacacatttcctttctgagaacaggaatcccctggggctttctgcctggcttccaaagctgagtggaggtgccaggtgagagaacactggctctgatttgcggcctcctgcattgcagttagggtctagaatggatgagcatttttttagaaggagctcagcaactctagaatctgaaacctttccaccaaatatgagtaactagaagctcttgtcttctgaagaataattgtcacacttataactcatgtttgcacagtacagcttataaagcaagctggcatcccttatttgatttgaatcagcaaccctgtgagcgtggcagggaaagtgtaccattaccccattttagtaaaacacagccaactccgcaaacatacctgagttgttcgggcacatgcaggagtgtgcgtcaaggctgggtcttgagttcagccctctggtttcaggtgctgcattctttccatgtggccttgcaagctccatccaggaggcagagggctggatccaattgggcaagtgaatttagaccaggagatatttaggatttttgggtggaatagggactgaaactttagagtgtgggcacttcctctcacatagaaaatgggatgtgtagagtcacaccaaatatcactctccccaaccctgtcagggacttggacttgttagttccaatacggataatcttggaaggcagcaggttaaggagggctacacatttaaagaccacagcaaccattaaaaaaatcactttactatcaaaattcttatactgtgcttggcattgggcaggaatagatgaatgaaagaagtgaggaataaaggcattagttgctggtgttgcgtgtgtctgaagctggcttgagcatttggggacagcagaagatactagctgcttggggacaagaaaattggaggtggatactctacaaagacagctccaactgattttataagaagtcagctatgtcccttattgtcaccttatttatggtgacataaattattataatcttctattgtcaccgccctcttcactcttgtagagcttttaatcaaatcattactgactacaccaagtgcaatcccactctccttcttgcacccttcccttgtcctttgtgccttgtttcccaccttggcacagccttgccgtgtctctgagtggatcctgcgtatatcatggtgcactcaacacagcccatactgctccatctccatgctgcttttctcataactagaatgctgcccctacctcctgctcttttctatctacccctgtccaatttaaaaagaaaaaaaagaaataaagcagacaagctccatttcagtgtatagaaattcctaccatgctctaagacccagctcatataacccctccttcatgaagactttgttaatcacattttctggacttaattgcttcctcttctcaaatcttatagcacattttccatacctctctcctacatttatcatctcatcccttcttttactgccatatatttataattcatccaaaggaccttgtatagtacctgccatgtgtcagccgttgtgcttggtggtgggaatacagagctaaatgagacctgatttctgacctcaaggaggtcacagtctaacagggaagacagacatacagagaaatcatattatcccagtatgacagaagctataagagatgtatgaacagtgttatttcaaataagatgtcagatgccaatttaaaatagttatatgtacctatatgtacttccataaatgtaattttccagctatacacacacacatatagagacagacttctctgctattctctctgtgtgtatgtctgtatatagcttgtaagaagagagaagtgctattactcatgaattattccaatttattttcatttctcctgctgtctaaaatccccccaggattatagccagttaggtcaaaaaggtacttatttgacaaagcttatttggtaaacctggctctcccaacaatttgcctagttcttttctcattacacatctctgtttcctatttttctctccaagaacaaagaaaacaaaagttatctttacccctgggccttgagctctagatctctctccctgatttgcagagtttagcaggtgtatttctagttcacataagaggtactcggtaaatatttgtggaattcatgaatgaatgataaactccttgagggcaagggtacgtttttctcttctctgcattcctattcattgccttgcacggaagcccacataaacacttactgagtagaggagcatcacgttagagcagaacaagcatggttgagtcagacaggcatgagcagaaatgctggttctgtctcttgctggttgtgtgctgtgggggcaatttgcttaacccttgggactctgtttctttatctgtaaaatgggcgatattatataatacctgctctgtttcaaaggttttttgtgaagattgagaattgcccagtgtagtacttagcacatagtaggagtgcaattaatgttagctcctgcttatgcttccttgagtttgagtcccattctcattctggggccatcagctggaggggattcaagtcaggttttgctgtagatccggaactaccccctccaccatcctgcctgccatatccaccgactgggtttccggagccacactctcatctctttctggtccgagtacttgcctaacagccccgagcttgttaggtgggtttattgcatctactttcaatgttcttccctggaaattcactcctccccagtggcgtttggaaggctgtgagtggtgggagaggtcggggtgggcaggctttctcttgctcttggttttgtttgcttggcatagaatgtcttaagcctgaaggttacattatcatctcttcatggctctattaatatccttctgggctgggctccaggggaaaaggagtttccatcctataattctcagtgttttgacttttcctctggggaatgctggtgtgaccacgctgaggtatcctcctcatacgtgtcccactccctgctttatttgtaaggttaaattcaatgtaaaggaagcagtgttttgctagattagaatctcaccgtggtggggtgggtagtgtcactgtagcatagaggtgggaaaggaaccatgatgtgatggagcctttctggaaatgtggtcctctggttgccacagaagattttcgaatcctactcagggtccatcgagtcagacttactgggggtgggccatggaatcagcatttaacaggctccccagtggctcttaggctccggctttattcatggaatgggaggagcactaccttgggggtacttggtcaaggtcagacattgccaaggcttaaccttgagtcatgttcccctttctggggctccattttttcatctataaaatgagagcaatagactggcttaatagcatctcctgctgaagtctgtgatttaccaacacaatatcaatatctttcatttactcaaaagcgattattgtataagaaccttcaatatgctgagcctgtgaaggagacagaagtactaaacacaatccctaccttaagttgtttagactttagttgagaaggccactcatgtaacgttcagaaactatcaatatagtgtttgtgataaattgcatgactcaattttaagcaaaataggacttcacaggagagaacatttttgatgtctgggataatcctgggaggccacctgaaaggggtgggcttttgactgttgctccaacatcaggcaggcaagtacaggggataatgaaaggatggggcacaggcagtgatacaatgatagagcatgaaagaaagcagagatgtgaggatgtgtttgtcttacctgaggtaccttgaaaaacttagattgtttaaaacagaggacaggtttttgcaagctagaaaaaatggttggaagagtatgcatgggccagattgtggagtctaagtgtgccagtctaaggagtatgaatttcatccattggcggaggaagccagtaaaggtttctgatcaaggaagtgcatgaattaagaggtaaaattgaaaccatctaccatgaaggcagaagtaatattcacagaagtgtggaaggatatgtgagtctggattctccaagaagcagacgtaaagatgaaatgagatctctgagaaacttatcaggaaaaatgcccgtgagagaaagtgggaaaggagccagagcagattgggacaactgctgggctaagatggacatctgaccccccggtgaaggagatgggtaaggaaggaagacaggcaggtaggctggctgggagcatctcagactgtagtgaggttctgtggaaagttcagcaaggctgttaggagatcttagcatcaatgtcacccatcaaggagtcctgtcacccaggaatgtgtctgcctagtattcctgttgcttgtaaccattggccaggagcagcttttgtggggtgtgggcttggcaagaggtagcaatggatttcagagcacaacagctggagtgcttagtcaattatgcttcctgcaggtggagatctgagaggcatgttctcatggcagctactgagaggaaggagaaactaaggagagtctaataatattctcttgagtggtttatctgcagaacgcctgcgtctttgctcatgatgcttcctccatgtagaaacacttcagcattccctttagctagttagtttctactctttctaggtattagtttgggtttcacccttaggaatccttccctgacctctatctagtttctgtttttggtgcttcaacattccccggttttccctgcattccccaccacagcacctatcagtctatataggaattgcctgctcatttcttaggtttctcccctactagactagactgtgagctactagaaggaagaatctggatcttttatttctgtatcccccatgtatagcccagtggccagaatatcatagtcatttaatagaggaagaaaggaaatgatggaaggagggagggaaaaagcggagtggtccaagctttgagtaaggagaagggttttccagatctagtggttagaagctctgctaattaagtgaaactcttaccctcagcatctctttcttcattctatgtagattttgcactttttagaggcatgtgccctgaaggcttgatgttggggaaaaatgattttggaggcatgtcctctgaaggcttgatgttggggaaaaaatgaaatggtctgacttgctcctgcagagcctgaggtggtcattctgactcattcctagtagatcagttttgagcttttttactttttccagaatttggcatggcctgcacatagcctcccatgcttttacacggtgactttaagaaggacttggtacatgaaataaggtcaaatgaagaacagaagaactttgaggtgtgtgtgtgtgtatgtgtgtgtgtataccatatatactgattcaacaaacagaaattatctggcaacttgctagacacttggtgaggctatggataagtttatttctctgttagtctctggctttaataaatgaggaaactagttatgaatgggaggggcaaagacctctaagtgactgtagagaacaattctttgcatgggttcctcactccttgctgttgtgctgtggtaataagacaggtagcttggtagagtctactgttctacaaatagccatgccactggtgtgtgctattaatacatactctttgatttgtgctgtggtaggtagtaggacaggtagcttggtaaattctactattctacaaatggccatgccattgatgatgtttcttgccaacctgccattcctcatcgcagagaaattgaatattcccgtcacctttggcacataatggatcatatcccttgcctttaatttttttcttggtttatatagaagaaatggaaatggggctgattgaccccatagagtgctggatgagaataaatctcaaagtgagcattttgttgttagttaagtgccataaaaatgtgcaatataatggctgattatttttctttaatcttaaatggatacctagaatgggaaagtcccatctcggtagcagaaattcattatctcggaaagaatttaatggttgctgtgaaaatgaactggaggaagttaaattgtggaatgggaaggagctgaaaaaagtgaaatgagttgtgcattaaatttagataaacacaattatgtgtaactggattatcacgcgtgcaggcaggcaatgtgtattatgcacctgcgttttgattaaaatcgattcaggtgcacgcacttagcatccttttaaatgtggagctgtgcctaagccactgcccggatgcatgagaggcaggtagggcaacatctgacagccaagtccccagctagagaaagcgcatgggaacagactggtcagcccaagattggttaagaaaaccaccaactggattactggtagcctcagctctctgatacgtccagcttccttttgggttacttaacatcaactgatgtcaagaaagtggtcatggagtccagtggggttcaatgatctgcttactccatagtagtgggggcaggtgatacatggtcgaaggcagatggtatcaggggatgttggggaagtaggcctgtctgcattcaggtatttatgcctgccaaggccctgttgatggaaacacaaaatctctttgaaccccttttacagacagaatcaggaccacttcccttttacccttttagttccaattctgtaaatcagagtcatctctggatcaaaagcaagcctatcatctgatctctgggtggccttggtggtgaacaaagccagctggcctgcatctgacctcgaaggaggacagatgtggagaaacagctgtcaatagccaattaattcctgttggcatgttttatttcaaatgcaagcactgtcaggattaaaataaatgctaccagttacagggatgcattaaattaataactttttcccccttgcttaatcctataataccccgcaactcaatggataaatactaagccctcctctgggtgataggagatgcattatatattgttacacaaactaaagtaagcttccttttttccctccctttgttcctctcctttgcccttatccccaaccccttgcaggtcatacttatcctgacgaagctgtatgacttcaacctgggcagcgtgactgagagttcactatggaggtaagcagattagagattcttaaggagccaccctggcttggctcacatgagaaacgcaagctaagcagttgggaagtgtggactggaaggagcagaagatagtcctcttcctggaagctcatgttaatgctctgggtggaactgatggcccccacctgtgaattcctttcctgctctgcttatctcttttgggacctgttgcaaatacaccttggccctctcattgcttctgtgcttttggagtgtctcattctacttgaagaaggtggggcctggctagagagatcagataaacatgcacgagtagaggttcttgattaggaagcctgctgtaggagagattcttgtcctggatgtgtgtcttggccaaaggactgcctccagccctttgcatctgctagatgctgtggttcttgagaaggcagtatcatggggacagatacacatgggaagagatacagatacaagtctgcatgatgatgttctgatccccaggcaattttgccttcaggggccccttgccccataaaataatattaaaaggtctgttttaccactgcgttggtataaagacaactacattaatatcatatattaaaacacttgtttcagcccagtttattcttttgattttaaaataaaacacttttggggcctctaagactattgtgagcctagctgctgtacctcttgtgcctagtggataagtttgccctgttaacaatgattgtgcacacaggacgagggagaagagggatgtgggtgagtgaagttagagagaaccttaataaagccatgaaaccaggagtttctcaggacagggaatgcccgtgtgttacacacacttacgcctatacctcctcacgtacatatgcacatccatacgaccacattgacgtgcagtcacactggtcgacagcgggtcttatcagtcactgggacttggtgcttcaccctctctgctaggtccatgagacttgaggtgttgtgtgttttctcccatttaccttgtgatgtgtcaatactgggcaggaagctgtcacaaaaagccatgcatctggctgcatcatcatccctactaagtcctgacctgagggtttcctggggttttggagcagaggggactggggtgtgaaatgcttcttcatctgacctgtttgtttgcagagaactaggcagcttctctccaggaaagagggagcagtcgcagtatctattaaatatttaggggttaattgctcatgtcgactgaggcctgcctccattttcacaggatgtctaaaacctaattttgctgctcagtgaaaattggcagaggtataagtaactagcatgcctcgaacaaatgaaagcatgactatttccactcacacggtactttccaggaaattagaacctcagaaacctcccttcaagcccaagcacaatgatgctgtgtgatactttaagcctcattcctgtggtgtctgcttggtcaaatcatgaaacaagccagaaaattctatctttatattgaagaacagctattcctgctactccatgttgcagaaaaggtttggctatttctaggagcaggctaggcaagtataggaacctaggccagttgcttaatgctagaggccttcaagttatgaagggtgtttctcacaatttcaagagtcagtgtattcatcagtatgtaccaagagacactatatagtttggtgtctgtaagggtaccctggtgttcaattgccaggattgaagtcccagtttgtccaccaccaagctgtgttattttgggcattttacttaatctctgtctattagttccccagggctgccataacaattactacaaactgagtggcttaaagcaacagaaatgtcttctctcacagttctggagcccagaagtctgaaatcaaggtgtcgtcagggctgtgttccttctgaaggatctagggttctcctggataaaccaggatgacctcatcttgagatccttaacttaatgacatctgcaaagaatcttttatcaaataaggttccattatagattctgggagttaggatggggacatatcttttaagggagtttatcattcagtccacttcactaagtctgtttctctgcatataaattggggttagcacagaacatgtctttgctctagcctcattttacttgctattcctccaacgtaccaaccacacttttcctgagagcctttacactcagattttccctctgcctagtgctcccaggtgacagggcagacaccttacttccttcctctctctggtcataggtcacctaatcatgaggtccttccccaggattccaaattccatcacttggctacatttttttttcttggtccttatcaccagctggcatatgctaaatgtttacttgctggtttgtttattgtcttcccacacccactcacatctaagcttgtagagagagggaatttttttcactttaattcagtgctgtattctcagcatctagaagattatttggcacacaagaggtgcttaataaatgtttacttagtgaataaattaatgaatgggctgttttaaggattaagtgaaacaaatataaaaacatttagtccagtaactcacatgtaggaagtgcttacttaactgtaattgttaatgattgtcatagccctgtgtttggatagcattttcattccattgttgactttgtttttaaggattccttgctgcagaggtgcatgtgagggaatttataagacaccaagcgggtgtagtctgtattctctaggaattagcagagatctttgaggttgaaggttgggggttagggaggggagaagagtgatttagaatgttgtcccttgtgctagttgggaggaattgaaataccaatttctgtctagtcaaagatattctttatagaaaagattctccaagctgggtggtggcatgaagggagggatgcagtttggcaagtggagaaatgtccctaccacagggcaaagtccaggtgaggctggtctgcggaagagaatggagccagacgggaggcacagggagcagctgagtgctggaccaggtccggagggtgtggagattgaccaggttcacagaaggggcccaagcaaagggagttactcagagcgaatttacagatcacagattccatatggtgtgaccttatggggatttggaaagctggtgaatattatgggttttccgtgttgaccaatatcatatatgagtatatttttgtgttaggtttcaggaggttcatggacctgataaagccccagcttaggagccactggatagagtgtgactgaggaaagggactgctcctaaactttctgggggtttcccggtttgctgggacctcatcgggagtcttctaactttttactgtctttctcacgtatcttctaaagatctgtatctcccgttctcttttcctgtactgataatgatgtattttatagttagagcctagagccgtatgatttcccttcctaatacagtgtgcagaccaaagaaactaaattaaacatgcaccctttcagcttcatgattcggcctaacatgcttaaccaagttgaaattgaattcagtgatcttcttcagtgttctgtaccatcaagaagcctggaacagcagctgtcatgacaagatgacaccccctgtcaggttgcaatgtgatataattatctgccttactggattaataattcagaggccatctacttctaaatagacaaaagattgtttaaaagcattaatttgtgtagcagtatcttgtgcccttgtgacattctttccagaataccttggtgctcttctactggtggtggccaaggttatttcttcaccaccaccagagtagttatgtaaatttgtcgtttagcacaaccatctgttggtatcccttagtcaaaaaacactttacctataagatatcatgtgtagagagttcatgaggttggggactgacttgtttaaaggaaccagggctttccctgagttacctgggtcataaggctgagattaggagcactccctggctcttcatctgagcctccttccacagtgtcatatatccatcttcaaaaatggaaagtctgcagctagacagacataaccctcctatttatgtctcttccattcctaacaaatgtaggccattgtcatgtggtagggtggtgctatggactcaaagggaggaccacatctttctcatttccatgagaactgcatatggtgcatgctttggtgccatatttatgccctctgcactcgtggatgcgcgtgtgtctctgcctcagttggtggcattcatggtcctcaattagggaggaaggatgtcacttttctctggaagtggaaactctgatagtgccaattaatccactgctcgaggttattaaatctttacttttgaacatatgtcctggtgaggatttatgtttctgattggcagatcgtttcttggactcatttctgtatgtcttggacatgagcccttggactgataaacaaaaactttaaagaagtttaagttacccccttctggagggaaatgagttagcaagcaattctccagcttctgcctgtccatcctaagcatgactgttcatcaagggtccctgactgatcagcttcagaacaaaatatacatggtaaaggaacttcaggtgtgaggtcaccacaggtatgcagtccccacaggtgcaaggtgtccacaggtgtgaggtctctgcaggagctctcctctggctgctggtctagggtcttcacagagctaaatgaatttgcagttgtctaggcatgagaggaaacaggaatcatttgcaaagaatgatcccttcaattggtagaccttggttcttcacctctctcctctcttgctttattgcacccacccttagccttgctttattgcacccaccctagtagtatgggagccattctactattagaaaagcaaccagactgcacagccattcttcctgtatgcctggcttcaggatgcaccataattgattatgatatatatggagagtacggattcccaggcacttcctgctggagacctttcatgaccctcctttctgggtgggaggctcctcttctgcttatgggtagctttatatccttacaccatactggtgattcgttcctagcctgtgaacttctcaagggcagggaccgtgtgccttagttgtttctggatcattgacaatgcttagcatttcaactatactaaataaggatttggagacctgacgaaagttttcaatagccccaaaccaatcccagcaccagccccgccttgccgtgtccctttccatgtattgagttgtctcatactcctgccacttggggattctgtgacttttcatctggttcacaagctgttgtctggaccacttatttcctccttaattgttctgtcagtgacctttctcggggatgctgcttttttaaaatagaaaatggagaccttttgaatttatgaattttttgtttgccaagaaaaccctgataataattgctaagacttcccagaagttattagtttacaaattttaatgacactcatgatttatttatgcacttccctccctctacagctgctcaccccaattccttggtggaattcctgctgaatctgagtgaattagtggaaacaaaactgcagattggaatgacattttttgctaggctgttaattaaaagccttccaccccattcgctaggctctttatatgtgaggtcccgaaggctgggctgatataagctgtgaaatcctccgtctaaaactgggacggtctcctatttgtttgctgtggtaatcaatctggtggaaactcctgaatgggtcacagaactttcaactgaacctatattaatcgagcacccattatgtaagcagccctgcgctcattgctgggagatacaaagtatgttatgcttgctatcctcaaggaatgtttcatttggttggaagataagatgaatgtacatgggaaacaacagcaggcatatgcaagaatatatacatatccacagaatacagtgcattttgcaatgactggctgtgctctagaaatacttgtatgtttattattaccaccccacttcattccataaaaaatacaaaacaattctaggaatgaatcggagaagagagcaatatggcaaatatattttgttttgctatttaatatattatatcctatttttccattgggatgtgtgagcttcttaaaaagaaaaacagccaggcctggtggctcatgcctgaaatcccagcactttgggaggctcaggcgggtggattacctgaggtcaggggttcacgaccagcctggccaacatggtgaaaccgtgtctctactaaaaaatacaaaaattagctaggcgtggtggtgggtgcctgtaatcccagctactcgggaggctgaggcaggagaatcacttgaacgcgggaagcggaggttgtagtgagctgagttgatgccactgcactccagcctaggcaacagagcgagactccatctcaaaaaaaaaaaaaaaaaaaaaaaaaaggaaagactatttcaggtattggtagttcccatggttcctagaaacacctggtgacagtgggtggcatatatagtgtttaaagggggtaggtcttggattcaaacagcctggatgtgaacccgagctctattgcttactagctataacaccttgagcaatgttttcatctctttgagcctcagtttacttttccataaaaatagaatgataataaagtctatctcatataggttttgtggaaattcagtgaaataatgcatggaatgcaaaagttgtcaatgtaatcagtatttaatataataattctggtttgttcataccctgttagctcagcagcctcagccaggctccagatgacaactgtgctaatacctttaggaggatggggtacagaacaaatctagactcctaggcacatcatgcctggaaattgtgcatttctacttgagagagaatattcctgtcttcccctttatgttctcatctgtgtttggcaaaaggtgaaagttaacgtatttcttggttttcatacaccagatgctgctgctgctgctgatttggggcacaggatgcaaacaaagtacaatctgattttcaatttcttcaacacagtgttaactcggtctttattggtttccttttcatataacttttggagggcctaagcccattgaagagctttgctatctcccaaataattaacatggaaggcagggtggggccatgcatgtttctcaaacttgttgcatcctcagaattacttgtggaatgtgttaaacatctaaatttatgggccctacccaagagatttcaatttagtaaggctggtcattactcaggaatttattatttcaaaagcttcagccaggtgcggtgactcgcacctataatcctagcattttgggaggctgaggcaagcagatggcttgagctcatgagttcgagaccagccagggaaacatggtaaaatcccgtttctacaaaaaatgttaaaaaattagccaggcatggcggcatgtgcctgtaggcccagctactgggggactgaggcgggaggatctcttgaacctcaggaggtcgaggctacagtgagctgagatcagctactgcactccaacctgggtgacaaagtgagaccctgtctcaaaaagaaaataaaagctccttggttgattctgatcctaggtaggattgggaaccactgaactcacccgaggaagcttgggttctaggcccacctctgttactaattaatcagattactcatgccgtccttctgtttcttcacaaataaaggtattagacgaaatgatcttttgaaactctttcaactctgagtccacagtctctgccatactgggaagtcaaacaggaagcacacacaggatttatgatacccaaaagatacctttcctgagctaacagcactgcttctgagcacaaccaccttctttcataaaatctgctggtgaagttgcaatccaagtgtcaataaaataacttactctgctaacttgctgttcactgatggatattatccagttggcagacattagccagaacacctgtctaaactacttagtttgaattcattaaacatagggagcatcatgcaatctatgaaagtctttgttctgagaaaaaaaaatagaatgagaaatgagtttgctctaaatattgggccctcagacatcttactttgctagagaattgagaaatgagaacactggagaagtagatctggattacagatttaatattttcctatttattatgggaaagagggcttctttttatgcctcttttttcttccactaggcaggactgcagcgtgcataaatcttgatttttggccagtggctgagagaatgtaacacttttctatggattgtgtctgtggattgttattttatgttgtattccctttcctccaaatgcaacaccattttatcacaatcttaaataaccctgccatttggataaaaggtgtgaaattctgcccatccctgtccacagcctgagctctctctcattttctcagcagtcaattcattagccttctaatgcagttgataagtgaataggatcagacagtctcttctaaaataacatttataggtggatgcatttccttgctctctaaggtaggccttaatttatttccctgccagatgtccatgtgtgtaaaactgtgataggtgggcccttggaatgtggtttgaagccaaaagaaaaagaaaaaaattcaactcacacagagcctatctattttcaagtttataggagagtgatttgatataccccattcctgcttatatatataatgactataaagattaggtagtcaaactttcatagttactttctcatcgtttggtggccaattactttattggacatagtctataaatgtcattaggaggtttctggcaaattcccttgtaagaccactgccctagacattatttgggtgaaaatatgtaaactggtaaaagacgtctcctccctgttacacgtctgtgagatttctttataagaatcactgaacttaggaagttttttatatcttaatgttgcttccaaatgttttgtgcccaagttaaagctaaagctgagctgtcttccaatacataaggtttatcttgtaaaagattccccccttcactgctattattctcttaaacttgtatactatttttagtcattgtccacatgaatacgggacagttctaatatttctgggaggaatgtaaggcctgtgtaattgaacattccattttgcagacagatctgtggtccctagtgggtttgtggtcagtgatttcagatctgggaccccaatctggatcttccagttctcagcagcccctttttcttgctgtcatgttggtaagcatgctttcctggccttacagatttggcaaccattcatgtttcatgtgagatctatggccgagggactattttgggactagtagtttccttggatatttgcctaagtgattttcaattcacgtggattatgagaatcacctgggaaatttaagaaaagtcagtttcctgggccttattctaatcccactgaatcaacttctggggtcaggatctatgaacttatagttttaaagaactcccctcttgattctgatgtgccactgatccaaggcactttatggccatctttgcttctaaaatgtcatttgcttctaaagttgttttggataactctcccacagcataccacctttccctctacccatctttcttccttctggctcagagtgatgagcgtaatcattcatgcagaaatccatagttgctccctcctctttataatgacgaccataaaggttaataattggaatgtgctctggcacttactaatgagcttacattctgtcagcatcagggctgtttaattgggcaattaacactgatcttagagagtggttccacaagagagtggtcatgaggtgctgctcccctggagctgtgcttgagataagccttatgagggtcagttggccgtcaggaatctaggttctggtggggatcagaggacacaaaaactggggaataggccgggcgcggtggctcatgcctgtaatcccagcactttgggaggccaaggcgggcggatcacaaagtcaggagttccagaccagcctgaccaacatggtgaaacctcatctctactaaaaatacaaaaagttaggcagccatggtggcgggcacctgtagtcccagctactcaggaagctgacgcaggagagttgcttgaacctaggaggtggaggttgcagtgagccaagattgcaccactgcactccagcctggatgacagaatgagactgcgtctcaaaaagcaaaacaaaacagaacaaaagctggggaacagattccaggtgccttttgaaggctttctattcataaaggtttttggttgcaagtaacagaaaccattgctaacttaagcaagatataggatttgttggaaggatactggaattgcccaacatttggaagaagagatgagcaaaaaaaccccagtagtgacaaaattctaggaatctccagcaaccatagcagctggatgtcatggatttacactccagtgagctgctatgagatgacagctgcctcctttgaggtttaaattcctggaagagaaaatggaagagaccacttgggtcaaggagtcgaaactttaactgtatttagtaggtaagagtttcctggcccagctggccctgttgttcgtatctatgcatagagagactgggatgatcagcagcagggcggcacatggttctgggaataccagacatcacagataccacatgcttcctgatggattctagtgtacagataaatatgtacaattttaaagaacatccctccaattataatatttatttaagaggccatcagttattatgtgtcagagaatgttccaggagctttaaccataaaaataccacttataaaaaccttgcaagggttttaccccatattggtggatgatgaacccgagattcgtgctgtcagtgggcaaaagagatgaagtttgacctcagatctgtaaaatgccaaaatccattcttgtctcacttgccccttgctgtctccccgaatagcttttaactcccagtttagttcgtgaacattgtctcagccctggacactcatttccacatctgttctcctgaaccttagacaatgtacaaagttttaacagtagggtcttcataaatgaaggtgatatgattggtcacataatatctctgcaatttttatttcttgtaatgcctccctcccaacccatccccacactaagagatgcaagtagaatgctcttagtcattcacaaattctccattcttcataggagaggtggtgggtgattatagaaaattgtctgggatgagtgtgccatttgtgttcacacatttttaatgcaaattttattgatataactgaatattcacaggcagttctaagaaataatacagagagatattgtgtatactttactcagtccccctcgatattttgcaaagctacaatataatatctctaggatattgacattgatataatccaccaacattatacagatactctaaggtttagttgtacccatttttttgtgtgagtttgtgtgggggtgtggggaaggtaggtttgtctatctgccctcatagttatgatgctgaactgttccatcactacaggaatctctcatcttgccattttataatcacacctacctccctcacccaaaacccctaatcgctaaaccctggcaaccactaatctgttctccatttctaaaattctattatttcaaaaatgttatagggtcatacagtatataaccttttgatgcttttctcacttttcttcatttagcataatcccctggagattcatgcacttttttgtgtatcaatacttcccttttattgacaagtagtagtctagggtatgaatgtacgtcaatttgtttaaccatttacctgttgaagggcatttgggttgtttctagtttttggctatggaaaataatgctgttctgaacatttgaatacaggttttcgtgcaaacatgttttcatttttctgggataaatacatatgagtgcagtttatcctaccctccttgaattgcttttgcccctttgtcaaaaatcagttgtacatatttatatgggactgttttttgctgtccattctgttgcattgggatgtgtccattcctctgccagtaccatcctcttcatattatagtgatatggtaagccttaatgtcaggcagaatgattactctcactttattcttctttgttttagctgttctagggcctgtgcttttctgtatatattttggaagaagcttgtctctgtttgccaaaatcaaaaccctggtggggttttgataggagttttgttaaacctataagtgaatttgtggactactgacatctttagtatattgagcctttgaatccatgaacatggtggtacatcttttaggtctatgatttctttcatcagcattttatagttttcaccatataaaatctgtgtgtattttgttaagtgtacacttatttaagtatttcactttctttggagtgattgtaaaatatattgtttgtttaatttcagttttcacatatttattgcaactgaccagaaaatgaaatgggattgtcttttgtgtgttgacattatttccccaagaccttgctcaacttatttggtatttgcttttgagtgtgtgtgtgtgtatgtgtgtgtgtgtgtgtgttttgagacagggtcttactctatcacccaagctggagtgcagtggtgtgaacatggctcaccacagccttgaactcctaggctcaagtggtcctccttcctcagcctcctgagtagctaggaccacaggcatgtgccaccatacctggctgatttctaatttttttgtagagatggagccttgccatgttgtccaggctggtcttgtactcctaggctcaagtgatcctcctgccttggcctcttaagaagtgctgggattacaggcatgagccaccatgcccagccatgcttttgaatgtttattgtgaactcagcacggtgctaggcgttttctgaatgcatcaggaaacagagtgaagttctctaatgaggtatgtaagcctatttggctctactcagaccctgtattagtataattcatttaatgagacctactgtgtacaatatctttcctaggcactgtgggccatatgagaatgtagaaaagattttcccttccaggtgcccctaattggttggtctctctctctctctctacatatatatatatcatcaattagaggcatatatatataaattagaggtatatatttatatatatagagagaaagataaaggaagagagaaagctatagaaagggagagagagagaccactgttatatgatattatgatattatgttatgattatatgctattctgtaataactaatttatatatatgcctctaattgattatatttatatttatatataaatatatacatagaaatgtatgtatatataaatatatacatagaaatgtatgtatttgtgtattcacatgtatatataaatatatacatataaatgtatttatatgtatatttataaatataaacaattagaggcatatatataaattatttcttgcagaatgtcatataacagtggtctctccctttctattgctttctcttttcctttatctctatctctctctatagatctctaattagatatatataatatacatataatatataaaaatatattagtatatataaatatatattaattatataaatatataatatatatcaatatataaataatatatatttatatataaataaattagagatatatatagagagaaagatgagggaagagagtgatagggagagagagaccactgttatatgatattctgtaagaaataataacagaattttaaaacaaaggcgtgtgagagagagagagagattaattctagctttggaggatcagaggatgcttatgccaggagcagaatatgagctaggctttggagggagagaaaaactttgatgagtggtgtgaggggatgggcatgctagataaggagtatagtcagattaaattcaggaggagagaatgttcagggaaaatctgacaaatggttaggaggcagtggagtgaaattgtgaatgcagttcagggaaggtgacccaaggaggaagctggccagacagtgaaagccacatagtggaagactttggtgccagactgagcagtttgaaatcttttctgtggagtagagaggaaggagtaaaggttgtaaacagatattatagaataattgctgtgttttagcaagatgtgtttagcaagggtgatttagtatggggagaaattgtaagcaaggaggaatagtttgcacaatgttatgatgttcttattgctttttcccattcatttattccttaattaatttatgcatttatgtatttgtttacttgtgtgcttattcatctgccagcccctgtagaatgtccaatgatctgatgttcaatgcatccaaaatgaggaaggcaggaagtcaaagttcagagcttccttgtttgaagggaaacaaaaacttttccccccagaatctctggctttccattgtataaacatggattctacaacattggggttagatgtgctgactggtgtcattgagtcttacatggtgaggggctatgaggtaccaggctttactggcttactgtacccagagaaagttcagacattctgaaaatgtagagtctccctagggaaaccgggcctcttgtaatggtggagcagaggataaagaaagtgacgtgacttcttaaacttatcccatttcattcctcggtgaggatctgggcggtcggtaggggaggactgtaacaatgcaaacggaagaatttggaactggacctaattctgatttactttgaaactttgatgcttcatattggcatcctcttcaaacacatctgcctgaatgctctaagccatgaaaattgagatactttaaagggttcatctgtgaaatgagacaatgagtttccaaagctctaaatttttctcttttgtgaatatttaaattcttgtgtaataattttactaataaaaaatgtttttccaaagcttgaaaaacaaagagtactgttaaaatataccaatcatctaaattccattcaaaatcattgttatgttttggcatatgcatacttaatacatatacgtatttttacccatatatctttacataattgagatcctcttgtataaacagttttttcctatttttatataatgtttgactaaaagtttgtatgttatcaaaatatttggcaaaaataattttaatgtttgcatgatagtgtattgttccataatttactcaagtattcatctgttttggagatttagattgttttacagtttttcattccttaaaaaatgttctggtgcatatctcgatacttaaatctttgtttttccatgcattttagagttttttccttaagatagacttccaggggatgaattttaagactcttagcatacattgtcagatttgttaagagaagtgtactttttttttttttttgagacggagtctcgctctgtcgcccaggctggagtgcaatggtgtgatctcggctcactgaaagctctgcctcccgggttcaagccattctcctgcctcagccccctgagtagctgagagtacaggtacccgccaccacgcctggctaattttttgtgtttttagtagagacggggtttttccatgttagccaggatggtcttgatctcctgacctcgtgatccgcccccctcagcctcccaaagtgctgggattacaggtgtgagccaccgcacctggcctgagaagtgtacatttataaaaaaaaaaaaaaacaacaaaaaagaagtgcacatttcttagactcttatgctggaaaagccaaactctgaaattaaacgagaaatattcacttagttgcagcttgtatgtgtgtgtgtgtggtgtgtgtatgttgcatacatgcatttacatgctttagggtgttagtatgcctaaatttattgtaaaattatgagaataagacttggataatgaaatctctggaaatcatgcatctccagactcaaagaagaatgtgtctctcctgctgccggaaaatgtccaggcccatctgatctgatagagccttcagaaataatgccgcatatctacaactatctgatctttgacaaacctgagaaaaacaagcaatggggaaaggattccctatttaataaatggtgctgggaaaattggctagccatatgtagaaagctgaaactggatcccttgcttacaccttatacaaaaattaattcaagatggattaaagacttaaacgttagacctaaagccataaaaaccctagaagaaaacctaggcattaccattcaggacataggcatgggcaaggacttcatgtctaaaacaccaaaagcaatgtcaacaaaagccaaaattgacaaatgggatctaattaaactcaagagcttctgcacagcaaaagaaactaccatcatagtgaacaggcaacctacaaaatgggagaaaattttcgcaacctactcatctctcaaagggctaatatccagaatctacaatgaactcaaacaaatttacaagaaaaaagcaaacaaccccatcaaaaagtgggcaaaggatatgaacagacacttctcaaaagaagacgtttatgcagccaaaagacacatgaaaaaatgctcatcatcactggccatcagagaaatgcaaatcaaaaccacaatgagataccatctcacaccagttagaatggcaatcattaaaaagtcaggaaacaacaggtgctggagaggatgtagagaagtaggaacacttttacactgttggtgggactgtaaactagttcaaccattgtggaagtcagtgtggcgattcctcagggatctagaactagaaataccatttgacccagccatcccattactgggtatatacccaaaggactataaatcatgctgctataaagacacatgcacacatatgtttattgcggcactattcacaatagcaaagacttggaaccaacccaaatgtccaacagtgatagactggattaagaaaatgtggcacatatacaccatggaatactatgcagccataaaaaatgatgagttcatgtcctttgtagggacatggatgaaattggaaatcatcattctcagtaaactatcgcaagaacaaaaaaccaaacaccgcgtttgctcactcataggtgggaattgaacagtgagaacacatggacacaggaaggggaacatcacactctggggactgttgtgaggtggggggaggggggaggggtagcattaggagatatacctaatgctaaatgacgagttaatgggtgcagcacaccagcatggcacatgtatacacatgtaactaacctgcacattgtacacatataccctaaaacttaaagtataataataataaaaaacagaaaagaaaaaaaatgaaaacaacaacagcagcatcaataataatgcttgcttacacttaccaagtaccatgtgccggacaatgatcgaagtgctttacatatgtttaactcattgctataataaaccaggtaaaaataggtaaacactgttatccccattttacagctgaaaaacctgaggggcagagagcttcagtaactttcctggcatgcttactaggtgtttgagctgtgatttggatctaagccctctgattctagagcctgtgcgcttgaccctctgcaagatagtccctgaataagacctggcttcagttggaggttgtcactggggttcccaacagtctcaaatctacagtcccctcagtggaagacccaggtgcaaagccttaagtgaaggatgaagagtagggtgaccttcctcctgggtgagacccaagactcttccaaatgcactgcctgttctggtttcatcaaggagaggtgtgtggaagggtccagtctccttccttcctgtaaagatttggaacaggtctcaactccccctcagttcagttcccttaataactactgagggacttgtcaaacagaagcttacctgttctgtacctgtcgtacctgttacctgtacctgcttaatgtgcacacccttgggagtctctgtacagagaagtgaaaagcatgctctctggcccataccacctggatttgaatcccagttatgccactttctagctgtgcacttgaggcagtaactcctctgggcctcactttctcatgtctaaagtacaagtgaaaacagctgggcagctgagtggacatcctgagttaataatggtaaagtgttggaacagtgatgactcccttaagcacatgttctgcctatgagggcttgcttcaatttctgtcaggattgctctgccttttgccctaatccctcaggactccagtaaggtctcatgactttgggcactcattctcgtgtttccccacaccctcaacacacacctcccccgagcctacttctttggtgcttgccccggtgtggaggcagcttctgatcaagttctccctgaagtgtcaaagggaaagcatggagagtgaaatggcaggacgtcacccagtgggaggatcagggaggacgttcccaggggtgtcagcctgatagggccaccataacgcagtaacactgggtgcttcaacaacagaaatgtcccaccgtcctggaggctgagtctgagattgaggtgttggcatggttagttccctctgagcatgcatctcccccagctcctggtggtttgctggcaatctttggtgcaccttggcttgtagaatcatcaccttacctctgcctttatctccgcatgtgtgcctgtgtccaaatttccactttatgagactaccaatcctattggatcaggagcccatcctactgcagtatgccctcatcataactaatacatctgcaacaactttgtttccaaataaggtcacattctgaggtcccagggtgagttcttcaacaggtgaattttgagggggtggacacaattcaagtcataacattggggaagtgcccatagctgaggctgaaggatgaggaagagttaaccgggagctcaagatttggggaaaagagagtgcataatggtacatggaccacaggatctttgcacaggtctgactggaatctttcaatgatccacactaccattagtgtggcttttcaaggagccagagtaagtcaagagtggcccagagtgtgggaggtggcagaggacaagccctgtggagttttgtcagcaatttttagcagtttaggttttactttgggcacaatgggaaagcattttaagcagataagtgacatttaatgaatgtttcacaagtttattataaaatttttactttattcctgattttttttttgagaataaaacttttttcttccagtttgttctccacttgtatttcttcatatggacttttcatatattttgtagttaatctgttggggacttgttttatcatttgtatgtgtttttaaatataatgtataaactgaattgtatgtgtttttaaatataatgtgtaaactgaattgtatgtgtttttaaatataatgcattgttgaatcagatgccaatattcccctcattcagtttttttacctgttatcatagtattgtttttcataaagtaagggatcaggaagtattatttatattttgtaaatcaaatctgcaaaaatcttaatttgtaaaagttacattccttcttagatttattttttaagattgaagagttcccacctttttaatctattcttacactgcagcaaattcatccttgagatgggaaatgtatgctaaaaattgtcgaggaagctgtgacattcatttggggaaacatctgcttgttttgtgctcaattatctcatcaaatcctccccaagtaggtacgttatactcttcctttttgcagagcgggaagctgaggctttaataaaatgggtaaaatctgctgagagacatacaggtggatttggatgataaacacaaatgggcaggccctgttcataaccaaggagtttctcagctggaagctttgagtggtttcttgggtggcttccaccttctcacttcagagtttggaacccagttctcagaggcaaactagggatatccctagcagaacacatgcctctatggagctgttctagccaggctactgcctcgctttcaaacatccctgcctttactgatgccatgtcttgttctggaatttcttcttctctcctcttacgcatttttaggacctaggatgtgttctgttttctcccatagctgttcttgagcatcctagcccagcatcctctcacttcttcattttgagtcccttagaatctgcttttctacccactcatctgctacctggtcttactgtgcatggcttcttgaggttacccatagcacctggctgtgttgtatgtgctcagtaagtgtctgttgggtagacagaggagcaggatccgtttaagtctccttgatcttgaggttaggagtctgttgaaagcctgcctgggtctagcagctgtgggtcttccaagcatcaggtagcttcatatggacacttagttgttggtaccctgtctgctcctatccctagctttgcagtggtggtgttttctgctctgtagcatatcttacatcacagctagatggtataggatggagagatggatattttggagtgagggcatgtgctggagtccagccagcagatgactgagaatggcatacatagaatgccacagttgtcaaaactcactggctattttgaagcagttgccagattgcctatcagggttgtcaaaagggacatttccaggagatctgaggacaagtgagggcaatatgtgctcaggggcagttatcataactgctagcatatattgaatagctactgtgtgccaggaatgggtattttttaatattatcctaatttaaacctcctgatggcaagacatttagaaagtgtggggtatgaaatgagctgaatatgatactttgagtacatagggatgtagtatggttttctggctttgctatcttgcccagaggtgtcagaaattgttaaatgtttataaaagccttaaaaaaatttttaaaaagatttttctctgctgggaacccatgggagtaggggagagcttagtgttattgcaaccacagccctggatctccaatgtgcatgacctccctggggtgactggatgaatatggtctcaggggccccatccagccttaggcatcttaggaatcctcagtgacctttttatgtgcactggcaccaaaactacattcagtcccttcagggttcagctccctgccattgccagtgtatacctgaagtggtacctggttaacaaagcttgtccatagggtctcactgggtgatattctctctctttcatggcctcttggtgtgctgtgatgggcaatatcagccagtggagtgctggtccagttgggtgctccaaggtcttttcatcagagacatgcttggacctattaaacacaatttaacactattaaagcttgagtgttaaggtgaatataccaagtttatatagagagcaaggagagcaagtagtggggtgataatgtgagatactgcaagaggacccaaatcaccaaaggcaaactggtgttctttcaatctctagaacaaaccaagcttttcctgcctgggggcttcacacctgtctgaaatattctcattcttctccctaccttcccctggtgcccccagccaatcacatttttcacagatctggtcttttttatcttttgtctcttcaatttaagtatctcttccccagagaggtgttacctggccatcctatctaagagaggtttccaggctggtcagtctctcagtcccttgttgagcacttgttataatagtaccacttgcagccattttattttacatcttatgtaggggttatttatttatttcactactgtttccccttccccatgaaacagagatttattgagagaagggattgtgtttttctcacacagcatggttcctcactgcctagtgctgtgtttggcacataggaggatctgtgtgaaagaaggaaagaaggaaggaaggaagacaggaaagcaggaaggcaggccggaatccacagcagaagccagggcagataggaggactcgagatgttcacttctcttggatggcaaatcttgacctgatcccttgtcaatctcttcctttttgaactttctcagttagatcactgacatttcatgctataagtcatcaagtctcctctacaaattttagggatgaagaaagtgagattctgagaagggaaatgacttgtttaaccatcctttattagggaaagaggttggaccagaactaaaaccagcgcactttcagacaggaaagcagacaccctcaaaagatcccaagagtccagtatttagtggtttgtgagtaggtgcttcgcttttattgatgaagcatagagaagtaggaaagttaagacagaaagacagtcaaatgctgggctttcacccgggagaaacccgtgagtctgaaaagccattctccaaaagggaccttaaagaaacatgaaagaaacatggaattttttcttgacatgaagctagaagctgagcacaatgcatctgacaatgaaaaaccaggctgtgccttagaacaggcttgggggtgggaggctcatgctttctttgcgagatagtacttcactcacagaggctgtttgcagtactctgtccttggtgatgagtcttcatgggaaggaggcatgtaggggtcagagaatagttttctatctgttccccatattcgtcagctgtggttgatgtattatccttgaaattggaaaagaaaaggagagaagaaatgcacatagaacagagctgaaaagtgaaccaaagacgaaaaaggtctgagagagagaaggggcatgattgaggtggttcttttgaggaagcgaagtgacgtttgacttagttttcatgttcaggtacttgagggtttgaagtctgaacaagaagaaatggacaaagattaaggcacgggagatgaggtttatgtaacagaatttaatgactattatgttggaaagctagcagggtggatatgtaaaagacatgtaaagagatatgcatttctgaaaaacaaatcatctacgttgactatccttaaagaacagagttaccagatttatgggtctaggaatttttttttagaaaagccagagttggaaactattcatcaggaccatcagtaactattatgtttatactttgagtccttcaagttaaaaaaaacctaggtacttccttaggctgtgtgaaagagtaattttggtgcttggaaaaatctgattttgaaaactagatgcctcagttatcagctgtaattcatatgcaaattatgtaacctctttcatcctcacattaatgtcctccatctggaaagtggggacaaagtttaccacagggggttaatttggacattcattgaaatttaagtgtctcttatttgtaaatcattcattcattgttcatttccattttttctctcaacagtttggaaaaggtggccttaatactggtggagttcatattttatggttcactttttactaactcaggtacttttattttttgcccataatctcttttggggtatgtcaattttgaacagtcactcatcacgctggttctgtatactttttaataagaacaggaagaattagactttaggaagattttcttgggttgtctagagtcactgaataccattatcataagatgctctcacatccttgttttattctcattaaacagattcattcctagaagcctactgtggcctagacaccacgtgaggaactagggattcctggggtggggacaagatagaccatgtctctgctctcgtggagtggacagactaatggggacaacagacagtagataagtacacaataagccaggtaataactaaatgtggctagtgctgcagggtggtgtgaaaggaactgggtgggcttgggagaggagaggagaggagaggagggggtgctttttttaaagtggtcaggggagaactcactggaagcagggctgggattagggtgaggaaagtgaaattcccagtgtacaattttttttttttttttttgagacgaagtctcgctctgtcgcccaggctggagtgcagtggcgagatctcggctcattgcaagctccgcctcctgggttcacgccattctcctgcctcagcctcccgagtagttgggactacaggtgcccaccaccacgcccggctaattttttgtatttttagtagagacagggtttcatcatgttaaccaggatggtctcgatctcctgacctcatgatctgcccgcctaggcctcccaaagtactgagattacaggcgtgagccactgcacctggcccagtgtacaatatttaaggaagcattcactcttagggtcctgcaagtgccttcttaaaattttgcaccctacatgccctgcttgcttgcctcatcccagtcccaggcctgcctaggaggtgacatgagttgagacctcaaagataatgaggatacaggccttcaaaggcatgcatgatcatcagctaaacaagtgagtgaagatagtgtttgctgtggctcatttcaatgtggtacagagatatctgtgtaaatcctgtaattgccaaaattgacccatcaatgttaaagaccctttttaagtggatcattttcttccttttacacagccatcaaatgcagcactaatgaggggtggtattcatcttgttttacaaccctgagcttctctgtattcattagcatgcaggaatctgactccctgtggttcctagaaacaggagcccctatccttgcttcatattttcatatacgattgtttttaattgctgaggagcctcatggctcagcccaggtggttacatttccaccttcactctgacgtcagaatgcttcagagctctgctctctgactaagggataatgtcttggctgccatcttggggaaatgtctctttgtaaataacgtgtgcagctatagactataaattaaaaacacatcaacaatattaacacatcattgagaaacaccacatggcaaagttccaaaactatgagcaaagttctaacccctgagcaatgcatgatatattgctgtttctaatgtggtctataagacagcttccctgacagaatctcacactattgaaaagctgtgttctcatgggactactcgcctgccacgcttcatgtagtttttcagagatgctcacttacatcttgcatttcagatagagaccgctttaatcaagctagtccatactcatggcttccaggccagactttgtccaactagtccagtgatagttcccctggctctgttttcctgatggcatctcagccagtggcagggtgagattctatgtttgatattcagcaggctcagccctgtgactataggagataagggcttccttcagggcacacatagacaccttcaagtcatttatatggagctcgatgctgggaatttgagtccctgagctcagctttttcttttaccattttgtctagcaacattggagcaactagccaatctcattatatttgttagttttctaaaaatgcttgaaaatatcatatacccagtcagacatcttttgctttgtgtaagttgttgattaggtgtatccaatgcaaatatttttcatgtttctattaccagttcagttcatgccatggactatatcagtgctctcttcactactgggaagcatcatttgcacctttaaaactaatcagattagagagcccattccagaaacaccagaaccaattcagaaaactcattctctagtaccactgcatttctgctactaaaatctatgttaaggttctctagagaaatagaaccaatatgatggatatgtgtgtatgtgtgaaatataatatacaaatatatatttatatacatatattacatatatttatatgtattcaaaattggattatgtgattttagaggctgaaaagtttcacaatgtgtaaatttcagcctgggtccaaaagccagagtgtccaaaccaagagtgtcggtggtgtgagttctagtccaaggacaggagaagactaatgttgaagatcaaacagtcaggaagagagacagaattcaaccttcctctgcctttttgttgtattcaggccttcaatgggttggatgatgctcactcacattgaagagggccatgtgcctgacttagtttaccaattcaaatgctaatctcttctgggaattcccttacagacacactcagaaataatgtttaaccagatatctgagcatcatgtggcccagtcaaattaacacataaaactaagcatcacagcatctttcggatggaccctctaggcactatcaccaaccatttcttctgaaaccataagcagaacacaccatgaaccatgtttaaatgtgctaggttgaatgtttgaagtcaggactctgttggaatatcaggatgcgtaattactacacatattatgtagtcctgattacctgagttctccctacctgagacatccttctggctaggttgtcaaccattctttcaaacatcttttatagtagaggccaaaagactgcaagctgctagccctgaagagcttagagtctagagcatcatcattattagctactgcaagtaattttccatcattgtaccttggtttcctcattgtcagaatggacataatgatggcatctatcacgtagagtcgctctgaggagtaaatgaatgagtagatatatggaaagttgttggaataatgcatggcatagcataagagctctagaaatgctctctattgctgtcattatcattatttctgttctcacggaattgatgcatattataaatgtcaacaattctcttaggatggtgcacattttaccatattttttatcatgcagatgaaatacatgtaaataaaagcacacatttaaattaatatttctttctttcattagtggttttatatattggtcctgcacctctcagccaatcttaatctttaggaaagagaaacactgatccacctttagtaaatgacaatgagtagagagtcattcattcattcatgcatgcatttatgcaacaggtatttattgagccctttgtgccagagtctatgctagccccttaatgaaaatgacagatcattatttgtttaatgtttttttttttcttgttaacaactattgtattacttcaaaaaaaggtaacacctaaaactgccatccaccccttgcacctcagcatgagggaaggtttggagagagacttttgagggaggactagggaaaggatgatggatcaggttgctttaggtctgaggacagcaaagaacaaagggcatgtatctgcgagggtagacctcaggataaccaggggagtggagggaaggagaaatggctcacttggagagggagagcctggctgtgatacggtcattttcccatgttgagcatgacctcgcagggctgtgcccagcctgatttgaatgggatgaggcatcccacactctcttattctcttatcctactacctgacttcagtgtccctctcggaaggaatttcccaatggacccacctctgaggcattcttctgactaggttgtcaaccattctcttgaacatcttttatagtggaggtcaaaggacttaaggtgaccagcccttaggagcctagagactacagccacacaaagcacaggagtgagcagaaagcacagtgggcagagcagccctccatactcatgggggcagggatgaccctctgtgcttcaggatacgagtagttggagaagaaccaaacccctgcttcccagaggaaccacgggatgaagtcatatgagagatgacagtgtgtcatacactatctgaaaattacatgtgggttaactttttaaattctcacagtaatccaagaggtgagtatttgaactatatctgttttacagacaaagaaaccaatgcacagggaacagaggcttctgttgtgacttagaccttgaaggatgagtaggatttagttacacaaagggaaaagagggagctttccagaaaagtggaaagtccgctcctaaactaaactaggagtgcaaaccaattttaagagtcagaattcatcagtggtgcagtgtccttttaagaattctgctactttagaaaattttgagcccttggcttttggccccactgtgtgcaccagctctgggcgtttggcaatgcaggtggaccctcaaatgcaaattgccagaaagataaatgagaattggtggctgtatttaattatgcagccttctgcaatgtgtctacaacagacattttttcttatggagagtaattattcttagcgtgcccatctgagtgagattatgctttggtaattggttttgaatccttgatccatttttatttgagccaccttgctagaatcctttctatcaatatttgtgaattgagcctgaggtacacgtgcccctgagacacaacttaaaggtgatcttgtttttgcccttcccagaaacctgtcgaggtgagggcagggagttcctggggtgatgggcagatcctggattgtgagatgcgcttgcttagtactctcagttcctgctgagaggactcagttttacccctttgcgtcttatttctggtggtagtcttaactgattggaacacatctgtactgtaggcaaggaggtgacttctgctctctcacaccctgagactactctgctcacactgacccattgattcacaaatgtagcccaatactcatctacctgactgaataaagtacacaaagtatacataccctctgtcaaccaaatcctactccaagtctgtctacccataactgtaatataaatatgataatagctgccacatgaaacttacaatgtaccatgagggatgcatgtaatcataattgggaaagtacttctcaattgtacattaaatcataaatggcaggcattgtcttcagcctggactgaactccagcagtgactcccctgtgaccttggcaagtcagttttcattcctgggcttttcattgttaggaaaatgaggggtttgtgtctgatactcctgactaagtatttttgagaatctatttgcatgctgaagtctttggcccagggaagaaaatagaggactcagtctcaatgtgagtgtgcatcagcattaccggtctgcaacaatttacagtcctgctaacgtgtcagcttctgggtcccatcctccagggctttttattcagaaagttggagatgggacctagggatcctcattttgatttttttttttttttgcaaacatcccaagaattctgatgtagttagtccatgagccaacttaggaatctctgaaatagagggtgaataacaaaggcgagtgaaggagaaagttcttgcaatgatatctcctctggggatgtctgggtttccactgagattcctttctttagctctatctcctctgtgtctggtgtgcttgcccaaatgtgcatgctcatgtccactcccacgcaccattacaaacaatatgggttgaaaagtttgttttctgaaaagcacaatatgctgaagtcttggcagaaggaaaattgtgttatgtgctgaaagcatcatcatttgccatgcgtgaaagcttatggctggaaggactgatatgccatttgcagagtatggtttacagtcatgtacacacacatacacacaagcacacagacaaacatacacatttgagtaagctcccacacagtaaatgtgtcaagaaaagagcaaggaaagatccaggaagaatctttgccctttctgcagcagagagctggtcacacgaatgtgtccgtcattttcacaagaagggcttttgtttcttgttttcaaagctggcagaaaatagaaacatagcaagggtttctgatgcagaaatgcagtaaggaatgcagaatgctgaatttcttcatccaggacccatttttcctcagtgggataaaacccttggttttcattcttccttactggctgaccagatcatccttgctggaaatccattcattcctaaatgggcttgacagcttccacttagaccaaagtgctcctcttggaatgtgtacagttgttgagcagtgggagccagttctgagcactgaacacaggcaatcaacagccccatttagctttgagctgactaccttcagaagaaggactgttatacctgttgagaaggaaagtgtgcatgaaaagtaatttccttctccttttttatagtggaaacaattgccttttgggggcagagcaccagcattctcttttggatgcagtagtcatacagtcaccatttggagatatgcaatctctcatttttattataattgtggcatatctttaatttgcttggcataatgcacttaatccataattataaaatatgcaactagcccttggcctcattctgctctcccaccacagaggcagtttggtgtttttattaatttaactttgtacaagctaacagattgtcataaaggaaaacagaatttctcaaccagttcggctaatagctgagcttcagcaaagggccctgtggtatgtgttgaacaataactacctctctccagcactacttgcagtttttaattgaattgctatcccatggatatcatgttggaactattcatctgctccactaagtcttctgatattaaacaagttctttcaggttattattgtaatacaaatacggttggacagttgatttccattaaaaattcactgccatggtaaggctaacacagtgaagggagcttatcctgaacatggccaagcaaagaaatcacattaataagggtgaaaatgcagtgtgcttatcttgtttgcttccttctcacaccctcctctttgtttaagaggatttggtcatgctgacatattttgacaaatgacaaaatactgggcattttcagagtttctagtttggttttagatatctgccatttggatctgccaataagaagacatgtccattcctctgggtttctcttctacctccatttttcctttgctatcttgtctctagcacacattgtcattccagttgacattacgaatatctgctgccaagagctattcttactgttataataaacatcttataggccttattgccctctgcattgtgtatactgatgcctttccaacgtgtactacttacactttctgatgtttgtatactgactagttcaccaaaatttcagaatatcaaaactataggggccctctggaaacccttaaatggtagggttttattaaaaaaaacaaatggaagtaaaccttatatgtaattgggatgggtagaattaggaatggctactatatattccagctttgtgaaggtgtcataatggaggaagcttattgtcctccctactgttactcctttaacttgcacacctaaccttgagtacatctcatcatattctttaccatatccctggcttgcagctctcttctgcatcacatcctgggaaatccttcttgatgacttctctatcaatattagaaaacacctttgggtctctgacctcatacccttcagctctcttctgcagccgcctaccagcaccaccaaatcttggttttcatcatcatttggaactaccttaccataataacttgaatccttgaattacactatgtgatcacagtctcctatttatccagttttcttacactcctacattcactgaatttgtgttttcatttgaatacatgatgtcttccattttctcaactcttccttactctcctcgagtcacatgtcttatcttccttaaaagattatatactcttcaaagaaaggaatcaagccttctacctactcattactttgcatggaatcatgtttgtcagttggtagatatttccaagccaagagtgttgtttgaccaatcaagaaaacaattataccctgacttctgaagtgggatatgcattgcatcaaggatgccatcttgggacatatgcatttatttgcagtttggttttacagtagtgggttatatgagcagtctctcttgaattcaaatcctgactgtgccattaaatagctatgtgaccatggacaagttacttgtcttagcttcaattttctcatctgcacaatgaggcacaatgatagggtctactgtgtgaagtaactgtgataattaaattagttaatgtttgtaaagtgatgagtgtatgtagtctctgaacttagtagactattaaaagatagttggtatttcattactgggagcttcagatcaatgtttacttaagataaacctttgaaatgtcagcattgaaatgttgaagacttttgagtctataagttgtgagtgagacccagctgctctaatgaaattcctagttagttattgccgctggcctgcccatgtctacaaaaaaatagatggtctcatgggctcaatggtgcatattagaagtgtttctaaattgtaaaacctgcatgcctgtctgattgagtaagtgctaggctgatggctagtgcaaagcttcacaatgggtataattatttgtggttttgaatctctagaccctataacatgaaggtgaagccttagaatagctaaatagactcacatggcaaaaggaaaatggctgtttttaaaataatacagccaaacataaacccacaggctcttaaagtttatctgagagtttctgaaccatgtttttttcccctagttactattactccatacttcaaggtcaaatgccaataaagtagcaaattgtatttctcaccttgacatggttattagatctgacattccttgagaaaaacagtgaagcctgctgacaaaaaggactgtgacttcaactgttgtaagtcactaagggcaataaacattcctgaaagagatttattctaaggattttaatcatttcctgttatagccggtttgtgttggataaacgtgtcatcaggtgctaattacttgccttgatttttctggctgatggaggatggtacttattttaatactgtcaccctgatctttgggtttctgccttttcatttggctattaacaaagcaagttagattccaaaatattttctagatatgcactcttcacattaatctgtagaagcacagaggttgtctggcacttatagatctgtttccacaggcacaatatcaaagacccagaaaagctttctgatccttccagaaaatagtaatatctcaggatgctgtgaaagagagagcctgggttgaaagttagaagcctggatagggtttttcatggctctgacccttgttgactgtagaattaggagtattcctctttcatatgcccccaaaactccacaccattgtcagatgctgtcacattgcacatgcaatgaactggtccaggttttccttccttccttccttccttccttccttccttccttccttcctttctttctttctcttccttccttcctttccttcttttcttttttctttctctctttctctttctctccttctttctttctttcttctttctctgcttttcttttttctcttttcttttgtttctttcaaaaggatgttgctttgtcactcagggtggagtatagcaaagcaatcgcagctcactgcagcctcagccttccaggcccaagcctcctaagtagctgggaccacaagtacatgtcaccatgcctggctaagatttatatttattttttccttttttttggagacaaggtctccctatattgcccaggttggtcttgaacttctgggctcaagtaatcctcctgctttggcctctcaaagtgttgagattacaactgtgagtcacagcacccagccaggtcttcctcttttaatcacaacacctactgtttcctagtaattcttaacccgtatttcacctagtccagtcaccattatccagcatgccttctggttatccacattattatttcgtcttaaatgtctttctttccaccctttctttgccttttcactttctccatctttcattgcccagccccagttccttccaatccacagtgatcaatgtttcttgtttaaaaaatttatttacccctcagaacctgtatcctcttatgtaaagtggatacacttacagtgcctctcatgaagattaagtgcacagatatttgactcataaaatattttcaataaatataatccctaccccagtaatgtatcttgctgtctgctattccttcaagccctgtgtgtctgggcctgaactggtcataggagtaaaaaaatatagatgctggtcacattctcaataggctcagaattaaataaggaaagatgtatacaaatcatttcaatgcaaggccatttaagggaataccatataaggacagaaaacaggctaagagaagacaggaagggaaattgtgccaggtgataagaaaaagatttcctgagaaggagtcagataccacatagagtatttcttccctatggttttctgcattttcctaagttttaaaacataggaaactgtatatttaacattatgatagttttcaaagtcttctctattctctaaattataaaactagttttcttatgaggtctccttaggaataatacttagattttgaaaatctgtttacttatttatacatatatacctcaccattttccagaagggatttcagatgtgcctgtactgaatatcttgaccatcatctcagtgcatatgtggaatgcaacttttgggaaatatacacagattcttcaattgcatttgtttatgaaattcttttttttttccattagctcaggaacaagaatgtaaccatagagattttcacaatttattcaatcacttggccaatatctgttgaacccatacttcattccagagcagtgccattttcttgggatacagatgtggacaagacattcatggaccctactcttgacaagttgacatgcttatagggaagcagacaacaagcaatgggataaattaataaaacaacataattagagctagtaatacattctgtgagggaaataaaaggtgctatgatgagcaaaggaggatgataggggtggggctatggagaatttcattatataagcattttgggcaaagggctcactttattatagaaggtacttgatgttcaagaagatttactcaaaatctgcaaaaaaaattgagctattgccttctgtgtttattatctttaattgtgtgtgcacacaagctgtatgtattatttatgaaaagatatctgtaagataaaaagcagaatctcccaattagaataagggttaggtattttatatgatgaaatacaatgtgaccatttaaaatattttatagggcctttaaaaataacataatccaatattagcatgaaaaaataatatgtggtttggaatgtaagtacataaaattatgccattatcagtcatgtttcagtctgaatgcactgtatgtattccaaatatggagggcttaaatacagagaattagagggatttgcacgatgtgttggatgttctaggaaacataggcatagatgcgaccattgatcccagccagcagtgccacagtggatgtttttgaagggctcaccctgaaggtatcacaaatctccaggaacctctggtaagccccagcctactccatcagcaaattcggtggttctcagggtcagatttgtgttataaaagactgcagcatgtctttcctgagacttgctacaagttaggattcaactttggagcactttaggatggacagattatgatggatcagcatatgttagttttctattaaaactattgtaacaaattaccaacatgtagtggcataaaataacagaagtttattattttgcagttttgtaagttagaagtccagtacaagtctcactgggataaaatcaaggtgaagtaggctgtgttcctttctggagaatctaggggagaatctacttccttgcttttttcagctgttataggctgcttatatcccttggctcatggtccctgtctccatcttcaaaggcaaccataacaggccaagtccttctcacctcaccactctctgacccactgcagctgaaaaaattctcctcttgtatagactcatatgattagattaggcccacctggataacccaggataatctcctgatctcaatatctttactctcaactatatatgctaagtcccttttgcaagagcatattggcaggccccagagattagggcttggacatcttcaggggctattattttgagcaccagcatgctaatgaaaaagatggtggggctagtcattatgagcccattgactgcctttgtgcaagccagacaaagatgcctcccctagttggagagggccacttgatgagcaaaaggggtttccgctgaatttagaaaaggcatcctttcttctagacaggtgctgccctgagccagggctcacggcttgcataacagagcacaggctgggtttcagacccacgcttccccttgatgggatggcttaacctgcacaaaactatacagaggccctgggtagaatcaatgggtggcaatagctagaagagaggtgatgaaatccggtgaatttaatcccccacctctttctcaggatgggattggggtggtggaggtgttaagccttggagctgctggggattccacagctctaatcctttctctcaggacccaatccactttgattcacttcctcatcatttcatttatattttaaataaccatgtaccacctgtccaaccaggctataacttcctggagggcggcaagcctacgttatcttcctcttatattccttattatacttccttattagatatttaacacatgtggcataaatgaaccaatgactgaaataaaacgtaatgagaattgtaaaagacctttaggatttaacaataaaagccattgttaccatctttttaaaaatagaaatacagagaaaaactattggacagcaaagtttcccttccctcctcagtctttccattccttgaacaatcctttcccccagtgggacctttcttttgtccattggctgttctatgctccctgcctttccttttctctttcaaaatctgctagttggtattgatgctcaggcatgattgagtttatcactgtggtctgcccttaaggaatacatgtgtttgatgcctaattataggattaaaagtctgctttgtgttaaaagaattgtcagagcaggtgggagaagcattttgggggcaggggcttccttggtacctctaacatcttatcccgtaggttgctacttctgccaatgcctccagcaggccctcccccgtctgctggagaaaggaaacattcttgcagaacatttcaagtacattatccagccctctattagaaaccctgctttccctcatcctgaccccctgccttactctgtaatattacaatgcagataagcacagaggtagcacgtgttgatgcggtcattactgagctgatcctgcttcacaagctatccattttgcagtgggaatgtcacaacatgagtcacaatgggacttcaaaactgtgtgtttgtcactctgtatccaggggagaaagacactaatatttcaaatttcctgagatttttctgcatatctgacttgttaaaacatataatctctgaaatctgagagataatgccttggaatcaaaactatgattatttatttgctccaacttcagcatcatttatgcagcaaagtatgaaaaaggaattacattccccgataacatcaggaaacccatatttaatgcagatttaaaaggacagatgctagcatactggttccactgatcattacaaacacacagaggtttagcagctgtctgatagctacatgcacagtacaatgagagatacaaatatgggtgagtgcatatagattgtagtttaatctcctgaaatatttctactgatcaatgactgtagcttcgtggtgtgcaattgtcctctttaaatcaaaatggcctgtctatttgtgaactctagctcagtgctttgctggagggaaaaagttgggaaagaagcccgttagtaatgcatagaatgatactttttaatcagaatattaacattttgattgaaccgatggaacatttaaatggaaatattcaattgcaaagaccaaacttgtgagggagcctacaacatgcacagggtctgtgcctttttccttgattaaagagaattcttttaatagagaaaaaagtaacagattaaagaatcttatattaagaatggaagggtgggtattgttcccttttcaattgcttctatttaaatatagacaagcacacacatgggcagctataaaggcagagactttgatctacggatgattgaagaagtgtgtagtaacttgcgtcaaaaaccaagcaaagcaaaaagactatgaaatgaggtgtaacatcagactgcgatgctagcaccagctccatccctaactggccatgtgaccttggagaagccactttactctctgggctcagtttttcacactggtcaaatggagacaatacttaaggaattcacacagttttcatgtggattgaaagggatttaaaaactctttgcatcttcagcagttggtaagcatccctgtttcccactgggaaaatgcaaatccccaaatagggtatgaagctagaggtgatgagctgctcagtggatgcacagtgaaatttaggaggcagagtctcctttaaagggttttgaccctttgactgatctgccactgattaataccccagttttctagagtaaagtaaatatctggattttcttttcacaacaaattgtgggtagagatccacctgattcacctgatacctctgctttgttcttaatccatcttggaatgaaacatctgactgcttctgaaatgcccagatttattgcaaaggaggttcccaagtcacttattatttttttgtttggctttgaagcatgatcaaaagtgtgactatttctttggtcaaaagaaatctcctggcttcagatactcttagagcagagcttagtgtttggaatgagaaaggaaaaaatgactatcagagcatcagcttatgaagcaagtatccttagaatgcttaaggttttgaagggcaattctgataaatatagtctcattgtttgtgctggggaaggagcatggcctcttagaactgtagaattctacagaatcattttacaagtgaagaacctgaggcccacagagagagaaagcattgggaaatatgtttatggatttgacccaacactcctgtttagggaagatacatccagatggccactcctatacccataacatacactatgattttttatttccttggtcaaccttccaatttgatacagcccagtcctcttgcttattcccatctccccacccagtgccactcctggccacagactgggatgatagcatctttgaagatatcagaaaagctagtgaacatttgtactagaaaaaggaatgctaattcattatttcattagcacataatatttcctctcttgactcctctcttccacttcaaagagaatgctgctgatttttggtgaagtgtggaagaaatcattctgctttccaggagactaacattatggaatcacagggaggaaggacacacattttaaggttacaggtggctgtgccacctgccagtcaattctcaacagacggagtaggagcttcattttttttattccagagcagagcagtggatgtcgggaagattcctgaacttcactgaagctgttttccacagggtctggtaagccaaggagtttccacactggggtgagtggatttgacagcagaggtggaaggaatctacaggaaagagctgcctaattaatcacaagctatcagagcctttcagcagtgagagtctctgaggtcttaacaacacccctcagtaaagttaaaaaccatcttggtatgacttcattttcttagagacacatgattgatctggctattggtgaatggagacactgcggcttctttctgtagatggtgtcattagatgagaagattaagtgcctttgagcaaaggctatgtgaagactgtgagtgattcactgggaatggaagaaagataaagaaaactctgaaatatgtacttttaaaggcaaaaccttagactttacctcatttattagcatcataaaaagcttggtggagagtctcagctaagaaaaatgccttctttgggtcaagtctttagggataccgctcaaagcagctaactggggctggtatctatgaggaatatcttattttttattgttggtcctactctattccccttttaagcttttgaatgctctgaaaggagacaggggtcttttcatttggagcctcttaagtattaggaagccaggctgggccaattcaacttcttttcctctaaggaggctgggaggtaggtttgtcagagcttatgattaattaggaagctctttcccatagactcctgcctttgctgtcaaatctgctcactccaatgtggtgactcctgggttttctttttcctgtggcaaacagcttcagtgaggttcaggaaacttacctacatccactgttctgctgtggaatgaggggggggaaagggtcctaccctatctgttgagaactgaccaaacagatggtacagccacctgtagcaaaccagggcaggcaatagagaagggttatcaatgcctatggtcaacagaagatttgtttacccttctgaaatcattcaagtttaaatttctaaatacttcttggcaggccaagtcaaacatttttagaaggacttagcccatgagtttccagtttgcaaccctgcaggtgataatatatctttaaaggagagaggagacatttaatgtaagtatgcttttgtcactcagttcactcattcatttattcattcctcaaccacgtcgagactgctcattgctggcttaccctggaggagacagaaaagtaagatctaaccactgacataaagcaatccaacatctaggatctatgatataaaaattcatatgttatgtcagagacttttagcgttatatacagtactgtaaagttcagagaaaatacaggatagtgagctttaggtgccagggaaaggatgcagtcagcagaccatggggagctattgaaggttttcaactggatgagtatttgagatggaatttaggaagaataatcatgttgtactgtatgggaagtgtgtgaaagtttgttcttagagaagggaggatcaggttccattgggtataggaaggaggtgacctttttgagaggtaatttgggtacaaaattcaacacacttaacagaacatttgggttcaagggaaaaaaaaagacatttctaaaatagttttgaattctcatagatagctatttgggtagaaaagcaggtacccatcagcaaagctctccataatctgatctcatgtatttttctagctttttttttttcctcctatgtccctccaggggtgcttgctaccaatcctagtggacctggactagttattctgcccagagcatctctttcattttttgcttctagattgtttttctcacactatttattctgcttctttgaagatggtaggaggtcaggagagtgtgagtgaactaaactttaaattcagtattttaacagagttcctgagaatctatcaagtagcaggcaccatgccaggagtaaagtggacaggcagatctttgtccagaagctgggctgatgacaaggagactgggctgctgctcacccacacagggagcactgtctcaggtcttcttgtagattctcatgggcacagcctggtggaacactgatgcctctgtcaaaagtttctgtctactggacattttggaatcataagccatgcccttttcaggatcttaacaacaaagatctcaaggacagcagattttagtttgtgctgccaggaagacttagtagatttaagagagcatacacacttgtgtttcaagtgagcaagacacacttttaaaatgttcaaaatattcctttccttctcagagatcctttgtgtaggtggcccttgtggcaatacggtattaagtactcagcaggacttttaaagtacatctttatgtactttaattttgttaggaccggaacagtgttaatggtcatcatctttttaaatgcttgcagagtattaatgcttaggagaaaaactttttccctcaaatatagaatgcataaccatgaaacaatatttttcgttttgcgtctttcccattctcatgccatcctacttatgtgaatatgtgatgtcaagcagatggctgtatcaaactagctggaacatacatatgatgactatcccattattcttggaaaggtctgagtgcacctcagcactacgaaggattttgacatttttccttaatagttctgagaatttctcttagctttcataatctgaagctgaatagttgaaacagtgatatgagaatattttgaggggagagcaagaaagaaaagaagaatatagttatatctgttttctgtgactgatgacttaacaatcctcaaagtcaagcaggaacactagagatggaaaatacattttatataggtaaaagataacccatttaacagctgaaaaaactgaggaaccataaatatcaggtgatagtctgagacaccctgctgctaatagatagcagctgcaggaggattagaatttctctgttggctccatgctccatagtccttaaatgcatctttaatactttttttctagtaagactgacttgatttgtggttttatgcaatgaggtggaggtggaggcttttattttggggtacatgatacataatgattggttagccctgtatgtgagcagccaaatctatttgcattcctttactcttagtagcctttctaaaattctcttatttatgtggtgtttctctctttacagtattcctgaaaattgcatttgaatatctttataacagggataatggtgaattattccatttactttatgaacttagtttcatatatgtttatgtgtgttcagaataggcagatacacagaatatgtccagataccacatatgttatttatatgtatatatataatacattacgtaaaatatatacagttgtgtatataatatataactctatcatctatctatctatctatctatctatctatctatctatctatctatctatctacattctcccctaaacctagatgtagaattaaaatatttctttaggtgggagcccaaaacagcagccattgatgggaaatgacttgcaaggcagaatctacttgccatctttttatgtttaatttaacatttgaaagaaggtggggaaaatatttgttcctagacttcctaaataaaatgttttttcctttattgatggggacaattttgaggtttgcttgaggttttctttccacaatttacccactaccttcttggtccaactttctgattagaacatatgcaggttattcactttcctgcctgtgagcttaattgcagtgctggctgcaggaaagtgttctaaaagtaatatttatgtgggagtatttggtaatcctagtgattcaaattttttcattcagcaagtaatttagtgaatatcttgctaaagtatagtagggaaaataattcattgtagagtgtctcttttacatggatttatgatttagttggggagacaaaagattcacatgcagtgattatatgaaaatttaaaaccttctgtgaacacatggcatagacactttgcagttcataaatgctaaaggacttcaggataaaaaatggtaattgtggactgcagtggttgggaagactttttgggtgcgagtagcttaagctaaggctgaaaggatggataagaaagagctgggcagagaggaggtacagaggacatactagaaagaggaatggcatgagcaaaatcttgggattggaaacaaatatggatcttggggagacctggagtcattcagtattgctggcatggagtgggagtgcataagaataactaaagatatagttactgatatggaggaaagaagaagggatgttagaaggctgtaaaggctccagtgaggagtttagacttcctcctggtggcttgttacttagaatgcagcttctagacaagagtccggttataggaaagggtggaattgtcactctgggtcaggttgttgggtgctcaccctgcgatcttgtctgcctcaagatccccaagtggtgatgttggtggttgtagttctcatccagaattttgtttagatcgcatgtgaactggattgttttcagctactaccacttctgatagttgtgctcacttattctcacctctatgactttgttgttctacttatgcttctgtggatgttttaagttctgtatctgtcatacatgatctactgcatctgtcagatctggcagtggctggatctgcatgaggtgtctaagtacagatgcttgcacatttagtataagaccagttatctctcttatcttccataccttcccagcaacatggtgggggcgggggggcgggggcggagcaagcccatgaagacagcatgagaccaatgagagtgcttctaagagtttgggtttatggtgtgttttttttgaaggcagttgggaagctgtgctctccccttggacctcttttccttttgcttgcagcattgagacatcatagatttcttttagtgagcattgtaaaaataattccccttacctttactttttagagtctcatacaattgtaacagttaacctcttttaaacgattttactcttttattcccctgcttctgagaataaaactgaaaattaaatgttaaaatcaaatccataaatccctagctaccaccagagcaaagtgtgactggctaagtagttggaccaggagactcaaatgctggccgatccaagaaattgggcttcattctattttcctgttaaggatcagaccttatggtactcagtggaaaatgtgaagtggcccagtaggagagtccattgttttccatgtttctaaaaacatgtgatctacatgtgctaccaatgcaaagtgaagatgttgtccattcttatttcactacttttaactacctctccagtactcaccttttttttctatgttgactcaaataaaggcaagaataaaaccttggaaatggcaggaaatttgtagattacctccatctaagtccagaggttacattttaaatacttaacaattggtatgacaggacaccaatcaatcacatagagaaaaacaaaatcagtcagagtagagaaagacaaatagggtcaggaggatccatgttatacaggtgttagctgggaggatctatgttacacaggtgttatagcctttcagtttgtgagttgtgggaagatccttggggagtgactgagttggctggaagacatttgggggcctcgagggcaacagccatttacaaaatccaattgttttaaaattattaccgttgaatattagccctacctattccctactttaggtcatatattttggagttgttagtggatgcataaacattaggattgttatgtcttctggaaagattgattactttatcattataaaatatttctctttatctgtggtagttgtttttttggctctgaaatctacttttcttggtattcatatagctacttaagcttttcttttttttattggtatatatttttttaccccatctttttgcttttaacttatttgtgtctttatatttaaagtgcatttcttttagacaccatctagttgagactctaaaggctccagtgaggagtgtagacattttatatttgtggtagatttcctgtgcttttttttttttttttaaatccgatctgacaatctttgctttttaattaaagttctagatcatttacatttaatgtaattattgatgttttaggtttaaatctgttgccttactctttattttcgatctgtcctattgttatttgttccattttccctccttttggatggtattttttttttttttttgctatcccattttatcttctttttgacttgctgtgtataactatttattgtgtcaggttaggggttgcttttgggtttatagtacacatctttaatttatcacaggctagattcaagtgacattttaccatctcacaaaaggcacaagaaccctaaaacagtatactctccttccagcccttggacaattagaggcatacattttatttctatgcatgttataaacctcacaatacattattattttttatttaaatagtttattcttgaaagatatttgaatattaagaaagagttatatttatccatgtagtcaccatttctggtgctctttgttttgcgtagatacatatttccatctggtatcattctaataattctgcctaaaggacttcctttacattttcttgtggtaccagtatacagatgatagttctttcatctgttttagaaaacctttattttgcttttgtttatcaaagaaatgtaatttaattggcttatttttcctttcagaactttaaaaatgtactttcttatcatttacattgtttctataaaataatcttctgtcatccatagctttgttccattccatatatctttttttctatattcttatgtttctatcactgatgttaagcaattgagtacgacgtgctttgatgttgttttattcatgattcttgtggttggaagtttttgtgcttctcggatatcgacttatagttttcaccaggttttgaaaatattcagccattatttcttaaaatatttttctctgccccacccccacacctccttctccttttagagactctgattacaactgatgttgtcctgcagcacactgattttctgttcattttttcctcagtttttttttgtgtttcattttggtatgcaaataaatagaaaaaacttattttttctatgtttcgttcactttctattgctgtgttttcaatttcatttaccttttccttgtaatgtctaatctgtcattaatcccttttagtgtacttttcatctcattcattataattttcatatctgaaagtttgatttgtgtcttcttatatctttcatgtctctacttgcatgtacacttttttctcttgcttcttgaacttgtggaataaagttaaaataactggtttaatgtccttatttactaattctgtcacctgtgtcatttctgacctggttttcagtaagttttgtcaacattggtaatattgacatttttcagtggctaataatttttgtaggggatttcctgtgcatcataggatatttagcagaattcctgtcctccacctactaaatgccagtcccatcttcagtcacgacaattaaacatttctccagatattgactaatgctcccaggatgcagacagtgagaaatcacccccagttgagaactactgatttagattaattgatttttcttctttttgtgtgttgtagatatctgcttctatgcatgccaaataattttttatctgataccagatactgtgatttttatcttattgggtgctggatattttaaaattcctgtaaattttattgagctttgttctgggacatgattatgttgtttggaaacagttgaattcttacacgtgttttgtttagggtttacaagtgttttgccccactactgaggcgggaagttttctgaggtattctacctgattccccatgacttatgagggttgccactctggcttatggtaacagtaactgttattggccttgtgtgaacttctggaattgttccttctaattctttcaggcggttctttttctgatgttgggtatttttcacatagatgcactgatcaatactcagctgaagacttagtaggatagggagtccgctctgtatatccagagttctctctacttgtgcagctgtccgtttttcagtactgcttcttgcaaactctagctgctttgccttaggctttcctgttctgtctgctgaactcagggagatcactgggcttcacctaagttacttttccctaatgtagcctgaaaactctgtccatgcagggttaaggggcaattacaaggcttactgaatttgtttactgtctcttagggatgcttctccttcattgtcttggtgtccagtgacatgaaaattgttgttttatatgttttattagttcttaaattgtttcatgtgagcgggtaaattcactctctgttactccctcttgtccagaatcagaagtacctatgctttattttatatctgataaaactgaggtccaaaaaagtgagttgttgcctaaggtttgctgaaccagattagtggcagagctagcattggatccagatttctttcttccaggttggtgctttttcaatcataacacacactatgactggcacctccgaaggtaatgaattggctcctggatcttcaaagacaagatttaaatcacaaagagaatgaacttcatggagttgctgctcttctttgatccttatttgttaaacatatttttctctaaataggtttgtgacccctcagtgaagatgtagactgtcagcgtgaatattttgtgaagattctcattttaagttttacaactttatactgctggaagttgtaaaaacatgtggcccttaaaaattccagcttgatggttaaaatgtccattcagggtctgttcatctttcttgttaggaaacctagattgtaagtatactaataacttaatagtaatggactagctcagtgctgtgtttagggagatgcactaagctagttgggattaggtattattttggccgagggtggaagtgagatttttaccttactcacagttcttaccacatcaagaccaataaaaacatctgctgcatgactgactattctgtttcacatatgttacttgtctgtaagcttctacaggtaaaggcaaaggccatggttaaatagtatctggccgggagcagtgtatcacacctgtaatcccagcactttgggaggctgaggcgggcagatcacctgaggtcaggagttgaaaaccagcctggccaacatggtgaaaccccatctctactaaaaatacaaaaaattagcagggcgtggtggcgtgtgcctgtagtcccagctgcttgggaggctgagacatgagaatcacttgtacccgggaggcggaggttgcagtagccgagatcgtgccactgcactccagcctgagcaacagagtgagattctgcctcaaaaaaaaaaaatttttttttctcctattgcttgagacacaaggtacttaatacatgtgagttctttcctcccactttatgtcttcccagtgtgaaactaggaggctgtaacacatagtgtgttctcattgcgtgcctctctctcttgctcactgtatttcagccttactgcctttctgtaattccttaaaaaagtcaatctctttcttccctaggatcctcatacatgccattctcactgcaaagctctttatttaactctttgcatgactcaatttttcaggtttagcctaaatggaatctccttttagaaggagctaccctctctcagtctctgtcatggtccctgtttgtttccattgtgcgtcatagtttcaggttttgaacttacttattagcacactagttcattgtctacctcccactctagattgtgagcttcatgagagccaggacttcgtttgctttattacttataattgacttgggtcccaaggaaaatgggcaggtatttggtttatacttgttgggatttgtgtttgtaaaagagtaacgtaatgcaaggctgatgtagatactcagcagggacttgtggaattaaatctccaagggtagtcggtctcccaggcatcgccatatgcaaagcataacctcattctgagtatagaatgaccaagaacaatggcctcttctgtccactccccacactgtctgccttgtcagctttggtaatcagagcaaggtaaggtgcagttcactccagtttgatttcacttgtagagagattttctatcagtggcatgtactggctgttttcaatgtttctgacagatgacaagccttttgtcccacttgtccccctttatgccttgactgactttggccacccagtcccctggtgcgagacctttaactggtcctttgtagagtctgtttctatgaattagggctcgtttccttccaaatgcccaagatgccttgccgtatctgctctgcatgtcgcaaagaatctagcaatctcaatggcgaagtgaacagctccttgcttttccagttatttccttctcaggcaagcactgccatgcttagtagtctggtcagctttctgctcttccgagactctccttcacccattctgataaggacctcgggttttctcctgtgacaaatttatggctctctccagcacctgttccatcctccctttctgcaacactcccaaccggcaaattcatttcattgtttagctatgtctactccctgtcaataaattacttcttcctggcttgcccaggcctttctatttttttcacagaccttttgggggcttgttcttaattattccagctactcactgaccaggcttcctctctgttatttgtcgtgaactcttgtgtaatctcctttcttctctccaccctttgctttcttatcattgttttacacacatgtaactgtcaaatcatgtcagttttataagcccataggtcctctcaactgcagcgtttctctcaaatagtgttagaggagggaaaaaggcattgctcttttcagtattcttcatctaccaacatttaatcaccaagcaattgctgagattcaactgtgtgcaacaccctggattggaatgagcagtggtggtgatggtgagtggagacagggtgttgaataccagagttatatttcacagcaaatattgaatcatgaaggctcttgagctggaaaatgactttgtgctccttagctgtgctttagcaaggcaaatttgacaccactctgaaacctggactgaggaggaggaggttcagaagtggaggaatataagctaggggagtcttagagaatcccaggcagcctggcaggcagctgatcatgttgaatttggattgtacagaaggagagaccaagaaggacccatgcacgaggtatttctgagctagcaaaacttggcagcaattagaggtgagggatggaagaacagtcatgatgattcgaatgttttggaccaggaagagttgtaggatttggtcctattaccaaattggggaatggaaaaggagaaggagggaggaagtgggggaggagaggtaggtgcaggagaatgatgatgggagaagtgacgagctcagttttagttagcatcctggaattgaaatggcaacggttcattgcacagcatttggaaatgtgggacaggcactcatgggagaggctagagctggataaagtttgggagtcatccaaatagaagtgggaagtgaaccagaggagcagccatatgcatattaaaaagcagctaatactgcaggcagcaggtgtggggctccagtgtggtatgaacaggccctgtgggctgtggacactcaggggatggtggagtaccatgacaggagctgtcagggaggacttcctcaaggaggtgaggctggagctgaggctttcctctgccttcacccagcatgccatttttgtttttacctatttcaatccctttccacatctgggcatgattttcatttgcacttataatcttcaaccccaaatattttccttcctctccatttgtgattaatctgaaagtagagggtagacagcagaggaaagatgccctcaggtgcaaactcgtgccccatcccttaaaggtagtgagtgatagcctctttttggaaagcatgttgggcagcagagactgaatcagaaacttcttatgtcccactaacaacagggagaaaaaaagtgttgtagagacttgcgtgcactttgccttcctaagaactctcatgtactgtatatcttctttctttgtccagaaactgactgctccagcatccctcagctcacactctcctttcctttccttttcacagcatctgtgtctcagggatgtgcaagaatataatgattcctgcttcctcagctggtctcatcagctgttctcatccactacactgagttctggctttgatggcaaggaaagggctccctctgctccctgaatgtctgtctccatgcctgtacacgcttacatgtatgatgggggaagagttttggatgctctccctgcctgctagctttgccaaagctattgaattaagcaggcaatttcctctcactttgtttctctgtaaatttcccaaccatatggtatgaggagagttcttggattataaataaacagcactgctcatgaatctcaggatttttgtttttccctccaatgggaataaatagaaagcatagatttgtaacttcagaaaaatgtgttggaggagaagataatgtctccctttatatacatatataaatatttttcttccatttctctttatgcagagtccctttttcctgggagttttctggccagagtccatttgttttttattactgccattttccaacctggaggtaaattgttgctctaaggcaatgtgataatagccacatgggcctggccagattgcactgaccagatgggtttggtgcatcttttctgctgctggagttgtcagttcccctctttgcaggacacagacttcctcactggtcttatggcaaaggaattcagggaatgggaaggatccacaagaccttggccttaataaagaatcacaatatttggcagccattttacctgatttcctgccactaaagctacagcgaatcagctgggcatgctagccaccaaggacaaatgccaggataggggcctgggactggaatggttgaggccaggggcaactcaaagaaggcataatttaaagtgtgagtgcagatttcgatctgagggaaaagcggagtgttggtgctgcaaggtcagtgagagcagttgtgtgattcaagaagtaatgagagaccacagtagggatggggcaagtgggcaggggtcagccagtggtggcccacaggccaaatgtagcccacttcttgtttatgtactgcttatgagctaagaacagttttcacatttttaaatggttgaaaaaaatcaaaaggatactacattgtaataccttagaaataaggtgaactcaaagtttagtgtccagaaataacatttgactggcacgcaactgtactcatttacttacatattgtctatagctgcttttgtgctataatggcagagttgagtagctgttacagagaccatatgcctcagagagtctaaaatatttgctttctggccctgtacagaaaaagcttactgtcccctggtctagagtaccaggaattatgatgggaattatggagagcaagcttagggcaggtgatgggtttaaaactaggtgctggactatagcatgctgggctcactcttttgggtgctgctcatacagtgaaactcattaggggcaggtcagttcatttaatgtgcaaaactgaggcaaaaactcatccctgagaatgtcaaagcaataatactttcagctttgttaagctttgggagacagggatttactctctcagtctgtacaaaaggtaacagtctgtgggcctatcatgttttcaccccgtcctagggccctgtcctcatacaaaacaattatctgataatataattcacacgaagtcattgactatttaatacctttcccagaattttgtcttttccaacaatgatctcaaacccaaaggaacgaatatttaaagacagacttttgggcactggacagattgttgcggaacatttacgagatgggaggcttcttgcatcacagtatatacagcctctaagagcagttccactaaaatgcataagatgcttcaaaagacaattttatagatagttgaagttatcaatgtacttctctttaaaagcaggataattttcacattgaaaagctgtatgttcatctaagattttaattttgttggtacgattcccctgcatccaaccctgactttctcatacatttatagtttggtaaactatggaatggtagaggaattttagagatcaatgacagaaactggagagaaagtttgatttcatttttcctttgtgagtgcagaatatagtctttcttgcaagtgaagcagttgttgggtggtcctgggaatggaatgctttgagcaagtcctgttctggtcgctaatgagttgaatgggttgcctgggggtagtcccacgtatgcttgccagccagcctttgagaacacacattcagatatctgccgcccatactgacttctcacattcacttagtccagctcattcattctagtggaggtgggaaatagagcgttaaatctccatgattgcacatctgttcctttgcacccttgacagaatggcttagggtaggtttgtggtggcttctctgtaaggcttccagtttctttatggagtgttgtctgagagccagtgtggtatctgaagaacgtgagttctaaagtcaggacaacctgttttcagacacccactttgccacttaccacatcagggaattttagaaaatctcttggtctctccaagcctcgcttctttatttgaaatattgggataaaagtaaaaatatctatcttattatacagtgcctaacacaatagtttgtttgtttcctttcattgtggtattctgagcatctagaatagtgtcaggcaagttataggcactgcatgaatatttggaaaatgaatgaagaatagggactcagcaaattgtatttctttttcttttggtaggtacggtatgtttctgggtatctcaagttagcttaaagtttccttgggggccataagtaattaactgcttttttatgtgtgagataaaatgctaatttcaaaaccctggaacctcactgttatattcctgtggcagggactgattagatattcactaaacctgtttcctcttcatcctgggcaagaaactagactacatttgtcagcctttattcattgactgaaatctggcccctggaaagaggctagtagtgatagatgccactttcatacctggcaaaaacacttcccacatttttcttcatgcttattcattttcggactcaccaattcaattgagatttccaagatctacaggagagcagaaccctaatgtggaaggaggctggatctcgaaagcactgcatagaacagagcccctatttttccccccatcaccctgctggctcatattgggctatgatatgagtgagaaatacactaacatagtgttaagtcactgaaatgttggtattgtttgctgttgcagttagttgcttcaatgcatacagtctccaagatgcatgtccagccctcccattcctacactcactttattctctagcctggatacctatttactattctcaagatatgctgtgtttttctagcatctagcatagctctgtttataccatagggactcagtaaacatctgttgattgatttctgggccaaagaatgaaacagcagcttcctataaaatgtaagcatgttttacatcagacagacctgatatttcagaggaaatattcatttaagtgttcttctctactatgggacttagtatatagtttttaaacagagaattcagcttatctggcacattaaaacttacagactcacacacatcctttcagggagattcctgccatataaaaggaaaattcagctgtatggagttctagatgtgttagaataacatcgcaggtaggctccatccaggagagagggtttcaggccagggatgtatgagctagcagtcaatgtcaggagccttggagaaatggagcatccatgccaagttttcccacctacatccagtgcttcatatgcaaacagcctaactttccccatttgtagaaagctgcacctaacttttctgttatgctctcacaccttggatgaattgcatggccaatgttgataacccagaaaatgacaactacttagctttctgttgcttccacaaagtaggtcaggaaatggaggggaagtgaattactctcccagacaggggttataccaggcagataactgtacttgctcaaaattgttttcttttatccatcagatatcttgaacatcttgccatcatcctaatgctaagataataataatagaaggcatttattgagctgaatgtgccaagcattaggtcaacattttctttactcatccattagctgccattgagtgctgtgaccatctccagaggttaccattttcctacatctaggatggccaatgcctagctgatatggggcacaaaagcccagccctcttgccttacagtgggacatgtatgtggtgaggtgtctgccccagagcctccctggggattaagcttcacaggaaaccacatccttgtttgtcttctgcttctttccagtcttgcttccctttctcccattaggttttgcctcaaagcactcccaccatagttcttgagcttccaaatcccagacttgggctctgattttagggaacccagcttaggatgttttccttttttctcaaagttggtttataatgtgctacagagatgctggctctgctggtttctgtcagtgataacagaattctctcaggcactcaggtttggtatctttaagatatctttacctgttccttcttcttcacctctgaccatgccagtaaacagattatgcttcttctacctgtcttttatttcttgcaacctacagtcatccaggatagtgagatggattcctgacaagtctttctacctctggagcatatgcttcaccaaaccatcatataaatcactaacagcttagtcctttcaaacaggctttatattcctatctcatttcttgtaagacaagttcaagcttcttagcagatatgtaggagcctccacataatcttattctactgatctgaacttatcccctcttatgcccgtgtaagaacattttatggcctggtgcggacgctcacgcctgtaatcccaggactttggggggccgaggtgggcggatcatgaggtcaggagttcaagaccagcctggccaacatggtgaaaccccgtctctactaaaaatgcaaaaaattaattacccagctgtggtggcacgcacctgtaatcccagctactcgggaggctgaggcaggagaattgcttaaacctgggaggtggaggttgcagtgagctgagatggtgccactgtactccagtgtgggcgacagagcaagactctatcttggggtggggggaggggggcggggaaagaacattttattatctacccagtctccttaattaccttctgaaaatacttgcatttttcaggttccaagcctttgagcatactctttgtcttctgttgaccttccaatactcaaccctctttcaaagcctacttttttcatgaagtcttccttcctttactttgagctcctctatcactaataaatgtcattgtcttcttcattgacattgtcaccatcatcatcatattaataatggccaccatttattaagagcctataatatgcatgacattgtgataaatgcttcatgtgcattgcctgctttagttaccaaacaacccaggaaaaactttttagatagttttgcccattttatagatgagaaaactgaagttcaaagagggtaagtgacctggtcaagatcacacaagtatctagtggtggaaccaggcattgaaaccatgtctgtgacttcgaagtttgtgcacttaaccactctggtaatatattccatttggcttaattgcttcctactcatttatcccttatttattcattaaaggtacttattgagttcctgcaatgtatcagggagtgtgcactggagacttagtagggtccttgtcctcagagttttatctaatagcactcttgagcccctttcctaactaccatctccccctcaaaccttcccctcacctacagtctctccaggagaggactgtctctgaatttcaccaatgtgctatgtcgtcttgcccagcctttcctggtggtcttgttattagatttaaaatgatgtttttcagcccttggctttcaggccttgctcatgccttgctttctagttatctagtgagagatggtcttgtctccctaagaccatattattctttctgacagtattcccactggtgcctagattaggtgatgcagaggctggcaaacctttgaacagctgaatgcttactccagagacattgccctcacttaggcagtttttgcaggacctcagtggcctctcagtggtgacagatctgcatctttggagcatagatctgcattttggaaggagccagaagccatttggagcttgatcagatgcatagaatgttggggatggcagggacttttgagatcattgattccaaccatctcattttacagagaaagagagtaatcaaactgtgaagcattgtttttggttggaaacaaagagtgtctgtaacaacaagactagaaacccaatcaaccataactcatggggcttgctgaatgcttaagtgtgagccactgaagatggctgataggaccatgttgctgccagtcctgatgattgttaactggctgagatacattctgtttctgactgggactctggctcctgtcagcaccttcacttgcccagttgagcactccctttacccaggggagcacccatctctggaaaagtgctgaattccagtgactctgagaggtcatggacttgaggaatgtttgtgtatgttgaggggagtgggctgtgagggacagggtccttgagccaaggcccttgcaggcttttgcatggattgaccatgaaaattgctgtcttctctttccagttatacttttttccttggcttctgcaaccttcttgttccaaagactccagaaccagttatctgagataaaatatgtttttctgttcaatagtcagatcactcagatgataggaagtggctgtcttcatcttgtgaagtcattgttattttccagaggagaaacagggaatggtggtaagacagttgtaggaaggaatgaaagcctgtcaagaaactaagctgattcttgccctgtgctttatgtaggttttctcactgaatcctcctaataacactgcttgatggcaactattatgcccatgttagatatggggaaactgaggcctggaaaggttaggcagtgtttttggtgttgtgttgctagtaggtaggagagcaggaattctaacctaattttgactccaagcattctcctttttatacttgtatagctttccaataggaaatgaccatggagaccccctgagcaggtgaatcagtgaaacccttgccatgtgatactttgtgaagcagatgctcaattaccattgtttaaataaatggccgggcattgaagtagagtgcatagaacttggaatcatatgacctgggttcaagttccaggattgtcatttggtcagtcacttaacgtctccgagtctgtttcctcatttttatgacagagataaaatatctatgtcagagggtcatagtgaggattcagtgaactgctttaagagaaagtgttttgtataaagcactatgcaaatgttagttacttaatgccacagtgatttagggtgacagtcttccgagaaattaattacagagtctaagtgtctgccagagtcttgatccttgacctcaagaagcttatagttgtggtgaggacaagagactatggaaatcagaggggacagggcaaattgtgctgtagatatataaaaacaatagaaaaccagagaaaggaaagataacagaagagcacggtagatgagagggctttacacaggagcctggagttgaactgtaaaggtttgaagtgagaggagattcgcgactgggcatagatttaacaataataaaaaaaggcatgttgtaagttacagtcctcttgggacccaggagttgttttgcatagagcagcagttctcaaagtatgactcagtgacccctggtagcctccatgactctcttcagaggatggatagagtcaaaactattctctaataataataaaatgttatctgctttttaaactcttattttcttatgagtgtacagtggagtttactagaggctacctggcatatttgatattatcacagattgaatgtagaaacagatacaagaatccatatatcttctattaaaccagatattaaagagctttgaaagaaaaatttgaaaagtaaaagaatgctaattttgtcatgaaattgttttgttttggaaactatagttttttaaataaaattatgttatttatattaacatgtaacagggttattgttattttaaaatgagtcaatattgtaaatttttctcagatgtaatttctgttgtaatatgtattgctagatataacacacttgaattaaatatcttggggtccttagtaacttttaaaagtataaaggagtcctgagtcataaaagtttgagaaccaaccactgttaaagacattctggtatggagatacagtaaaggtctcagatttttatcacactttggcgtcaatgtgtatgtcctttggtatcttagaacatctatgtacaggaatttcaagatgataatgcccaatgttgcaagcatgcagtgaaactggtacttttatacattgttaatagaagtgcagactggccagagtatgtctgtaaggcactttatagcaagagctttaatgataatttttatcctttgaactagtaattacacttacatgaatctattctagggaaacaaataatgatacatacaaatatttatgtctgacaacacacattcaagttatttaatacaagattttggctagaaactgaccaactggccagagaagatagttaaagtaaattatgatgcattcatacactggaatgttgtaaggctttaaaataaaatgatatttttgaaaaatatgtaacaatatgtggaaatgcttacaatattatgttaaatggaaaatcaggacccaaattctataaataatgaccccaaattttgtaaacacacaagagttaaagaaaaacacaccaaaatgttaactgagtttttctatatgatgtggctatcttgtgcgttattattttttttttaatttaagggtatttctaccataaattttcagtattttttttttaaaagactctagggtgtgacattccttttatccaaggctgtggtaaccagtctactgagccagcccatgtcatgtgggttcaggcgcacactgcctcagatcttgaaagggacacttctctaagagtcactgtgatagtttaaggcatattctatgacttgacaatacatccgacttctagctaattgctttttcctgcttagccattcaaaagaaagcttagaaaatactgagattgtttttcatgccctactactcgggtctgttgtcaagaacagtcagtgtagaatgtaggatccaataggcaattgttttaaatgatgtgcatgtaacacagcacagagagcagagcaatcactccataatttttacaaaggaagagataaatgaagttttaggtttctggacccaaaacgagatgaagttactatagtgttagaggctcaaaaaggagagctgtaattcactccttggaaactgggaatttcctcttcttcttgcctgtgttggaaaacaccatgtgttggaagactttagccctctttctattctggatggccagtaggacaactggtaaaactggtccagcacaaaggagcatctgctttgctattagtttctcacagcagaacagtttcagtcagaagggaatctgtctgaatgtgactatttcagtccctgggacatattttctcagtttgaggatttaccctgcatggcattattcagcatgatttaggggttaaaagagacgtccaaggtagtcccttgacttcaaagaccttattctgtctggagaaagaagtgtcatgcacacaaagttaaataatggcataaaacaacagcagaaaagagaaaaagatgtggtcccagaaagccgatacgatgctctctgagagtgacaaagatgctgagcactgggaaagcagaggcaggtgagatgagaggctccgtcggggaggatggcggcagaaggagacactctcttctctcccgggctgaagactctgggaggggaggtatttgcattaattgaaaagtgattaatgaaagcattgagtgccttccatgtgcaaggcattgtgcttattacagaaaaggaaaatatttaaagatgagtgggacacagaatttagtttcttgagggtaggaaggtggtctgaaggctctctatttattcatgttccttcattgggcggctgcacattttatcctggaggtttctggatgtgcccaaacagacataattgtgcacatgtcacagggccccgactggctctatgtaattttaaagagaaatgataaacatatttattttttagacagtgatgccttgctaaaactgtccagcacctgctagtgtaggcctcattatttttttccccaggaaaacttagtggaaaagttgggttcgttttccctggactttaatttgttaagtgttggccacctgctggaggctatctttgattacatgtagcaggccccccatcctcccatgtgtcttttggtagcttactgctgatatggtgggaatgagatggcgttagcctgtccactgggggttatgtagctataacacagctgctgtttgcccagaaatgtgtgaggcagtttctccttctgtgataatattattggtctaccttggtgttgcccaacaacagacagtgaagtgaaccctctgatagtagggctatataagcttcacaaaagccctaagaacacaacatttagattcccattgagcagacatgaaacatgagtttatataattagtctgaggctccacagactggatttgaatccaaatctccttgactctgaaatgaatcctcttgtgattcttttggtctgcctttttgaacgcagaagcttatctgtaactgggttctcctacagatgtgttaatttgttgattaacattgtgactgtttggtaacaatcactttattgctataatttttaactacatgagtcatacttggatacacttttgtttgaaaacatctcaacattacaagtaaattcaagtgcttctagctacctaaccccagcccaccccggttccctacccagtggtaacttctattagtagttttatatattttccactagattttatatgtatttgtttacacgcttataaacttaatggaaatgtattgccttgttgtgtctggatatactgtgtgtgtgtaatatatttagtattatgtcttagagacttttcaggtcaataactctggtatctgtcttactcttgaatgctgctgtatagtactgtgtgtgtgtgtgtgtgtgtgtgtgtaatacactctatttagcctttccctgataattgttattcagttatgttcatatcaacagagatgcagtgaattatgggctgtcataccttctcatgggcctgtttgtgcactttcttttccctggagggcttctttccttcccttacgtgcatgatacaaataggtcttttgcctgataggttagagtttttggcattttaaaacctaaatataacaactcaccatcctattttctgaactgaaggtcttcagtgagaactaatgtgttcacaccaaataaagaaaggaaaagaaagaaactgaagatctgaatattggcccaaccccatatacttcagcctctgtcctacctgagacgtgtgctgggaagctgctgctggtgggtctacaacttatctgatccgaaccatgaattctgcatgactggtctccaaagacagcaaacctccaattttccgcatttagaaccggtgatggctctcattcaaatagtgggggcaggaggaaatagagacgaattaattatcctgtatcattgtgcctctctttgtgagactaaacaatgcagccatgagttgggtaaaaagaggtcagggagagctgtgtaagcttctgcactggcatcaaccttcctgtggagtttctgaagcagagggtggggcaatacccacttggagaatgaagctgtttaaatgacttacttttggcttgaggtctgaaattagttatctggatggttatttgtggtcaggctgggcttctgccattgcaaagatacagattaatgtgactttgggcactggccctaaaatgaggagtggaataggccagagggaaacattaatgcttttccatcacaactctctgagaagtctttggtctggagctgtgctgtgggaactcctgacgctgaccttggaatgggctgtggttcaccacacaccagagcacctaatagcctatggtctttgattgttgacaatcctcagtgtatctcagtggagtacacctgaaggagctgctagtgggtgctccccaaggcctggcacttggaagcatagttgtatcttttgattctccaggcaactgggtcttatcatacacttatggtgacaattggaaacagtgtccacagatcctttaatgatttattgggtatccgtgtgcctcacccctattaagtgtaagtagtgcaaatcaagaaaaagaaaacaaggtgatttcccttgaggacaatacaatcaggggtattcataaaaatgacagccataagcatttatggaacaagggcttttagcagatgctaagctaggtatcttattactcttcattgaatctgaataacaacaactctattgtctgagctgaggttcagagacatgaaaagcttgcacagctagatctggctctgagtctagttgtctttgtactactccagtctgcttgttttctttatgtagaactgtgctctgcactttcagaaattaaaaaaaaaattcatttgtgactgttcttttgagaagcttttagcaattgctgaaaatatcaaaagcacacatgtatattcagagaataaatagggagctcttaggtgcaattggtgtaaatgcagaggagggcgtgggtgggaattataggaaagatctttgtagtacaatgagtactggagctgggagtaaaaaaggagacaatctgaacattggaggcaatggtaaagcaaagcaggtaaactacgaaggccttgaatgccagacagaggcagatgtttgacctgatgtggcagccaggcagggaaggatgctctagggtatcagagatccaggcagaaatcttgagaagttgtcttagagacaaaagcagggtgagaacatgactcgggggtgggacagaggtggaggctgatattctctacctctagctgataccagctagagcagcaccaccaaatcatacccctcctgcttttgcaaaagcaccctttcattttgctattgtgcttggcttgtttggagctgcaaaaggtcagagttgagtagttgtggcggaggtccacaaaacccaaaatatttactatctggttgttttacaggaaaaaaaagtttgccaacctgagctagagctactttaaatggccggaaaggggaagcaaagcacagtgtgcctagcccatgtcagatgccgtggttgataaatatatgcaaaggaatgagccaaacatggcaacgcagaagttgctgagaggaaaggaacaaccacaactgtggttgtttgccaattttagattgtttgccagttttagattgtatccctcagaaggcaggccactgaggagatgacttctgactggtgaaagatgccagggttaatgatccttaattttgcagagctcaggggcaagaagaggagaagaaatgaggagaggactgaggaccagggtggtaaacaccagaagaaggtgctgactggataaggaaagccatgtgctcacccagattgagaacatcagatggccccgtgagagctggcagagtgtctatctctggccagaatggggcattaggacagggaggttgagctgcagttcagctctactgagaggctgacttggctgcatcgactggatgtcttttctgtttttttttttttcttttaaaatagcccatattcttattgccaccagcctctccccgagaagatcactagaggagtagtgaacttgctgggtaggtaaaaagcatacgataactcacacctccactcctgactgaaattgtcagtgggaaagtggccctgtgggaatgaccaagtgtatggcaggtcagactgggggttcctcccacaatgtaccagtccgcactaagtccttcggaatgcctctggatgagacaagaactcagtgaacagtttcaggactcagactaggagttgatgccatagaatagtcccaagcacctctacgaagttgaagagggaggatgtccagtctgccagtcagcatcaggtacctggagagtagcgtgagtgacaggtagctggcaggacctgccagatgatgagcaggtgcctgagcaggcggtgaaaccaaggagcagtgtctctttggaggtacagtctccttggagaagatgttgtaaatagccagtgaagtagaagttatgccctgaggtgacccacacagagacgtcaccccagaaaaacttttcttcacaaatacacaagaagccacgcataagaatgtttgttgtaacattgtttataatagcaaattaaaaaaaatacttctcagtggtttgaaaggataagcagtggtttattcataagctgaaacactagatagcagttaaagtgaatgaatgaccactaggtatgtaacacggatacatctcacaagccgaatgttgggtgaaataagcaagctgctgaacatatatcctatgtgagaacacttatgtacatgtagaaacactcaaaaaggttatgtgttgtttatgcacacaaacacttgttaaatctaatagtggccaaatgatgggcattgcattgtgtttttctgtgtgctggaaataataagaaaaaaagaacaagggatagagacacacatgtgtgtgcacacacacgtgacagtggagtggggttggggtaactggagccagggtacaggagccagagccccgtggctacactgacctcatgcgccaccttccaggttagttgtgtgcactgaacaattcagaatggtaactggcagagtgccaggcccatgcctggctcagggcactggtgtcatggctccagtgttctgaacatttcagtcttatgaacctagtgtcaggatttgggaggctagctttaaaattgatgagatgagcctgttttctctaagtgaccccactggctgatgtctggaatcacaaagtagagaggatggtttgctttcttgtaagagcaagttctgccagcataaatgtctctggcaatggggctgagacctctctaccatttgcccctcaccccaggccaagtgggcccacagaatgctgtggtcagggcagtgtgcagtggccatcctggaaaggacagagtcgagggcactgttggttccataggctcccaggctccctgaggtatcttcatcaaataggacttgttcctctgagaccaaatgagcagaacctgccagaggcatggaggagactgagacatagagggtgtcctttgttgggcagtccctcttttcagcagccacttttggaaaatagcaaagtcagtgttaatctgtcatgcagcttgtgaaagtgagaccatgtgtgatgatcagcgtactatcttttgtgagagttatttggattcgggaaggaagtttgttgtgacttccatcagtcctgcagggatccctgagaatttagctcttctaagacttttgctatagatagtatgagaaaaagatgatagttggaaaacaacttagcattgtgttggtggtttaataaaatttaagatcccataagggaccttaggattatgtaagtaaacctcttgtgttaatgatggaatggagcttgacaaagatgctttccttaaccaaacttgagttaggatcctctgagctctttttttaactaggctcccctgcttgggcatgttctcaagagtccaattttttaacaagaatccttctaagtcatgttagccagaatctcccagcctctgttgctaatgaaagtcctcatcctccactataatctagataatatctgatcaccctggcctgcattcagcaagaaacttgttagattagtaacaaagaattaccctcccctgttagcaatttttcatccactgacctctcctctgcctctgataaaaaattcccacttttcctttttctatttggagttgagccctgtctttcccctactgcaaaatcccattgcagtagtctctctacatattgcagtagtcctgaataaagtttacttaatcattttaaccagtgtcagaataattttttaacagccttctaaaagtggcttgtgcagggtaacacgttgagtgcatttgaaaatcagctctacagtctcgacttctaggctccagcttcaatgttctttctccacaccatgctgccttaatgccttcaagagtgtagaattaagaagtaattaactctgtaaaatattttacttggattaataaaaatgcaaatgacagcctctagagatcatggtctatctccagtcttgcactgcctaggatagttgctcagggtgatttgtcatttaaccgtaattctactacaagtgaattacagacccttccctaggacagaccttgctagactgtaccgtctgcactgttgtgctagcatccaaagcctcaagcgtgttttctaggcattgtttgctgtgtgttgaattaccactagacatcagtagttggttaaaaacttgtgagtaggtttggacaatctcattcatccattcattcttacaaataaagacaaattaaaacaatacaaaaactattactttcagcagttgctttgtaccaggcatggtgcaagacactggagctgttaaaaacatggttctagtcttcaaggagttacagccaaggaagagatcccagaataaggacagtgtagccaaaccaataggataaatgcttaaatagaaatgcgtacaagatagtacgggaccacagaggagattgtgattaatcccccccgggaaagctggaaaagggtgatgttggaattagatgttgagggttggaggaaaatttgccaagtagaggaaacagggatggatagttcggacaaggagatgatgcgtacagcagcggagggcagtgagaatgtaggacatgctcaggaaagtttagcgaggctggagagaaagggccagaggagcaagtggctgggaatgggtccagaaagggacgttgaagccagattttacaagacttaagcttggaagattcagcttgactgtgtgcattgggcaattactaccaaggagtgaggtggacagatctggggtagaaaaatagcctggtaacagcatggaggatgaatgggggagggagaagactggaagaagagcatcaaattgggggatcgttgaaacatgatgatgtatgagccacagcattggtgtgatgatggaaaggataccaggggtctaagttttttaggaaatagcattattaagacttgaagagtgatctgcgttgtagaaaggcaaggagaaagattgggagtgattcccagagcttctgtgcctgcagtagacaagagtcagagaataagtcagcttttgggggattgatgattaaagttagcataactcatgaccatgtggagccagtagcctagggaggggtttgaaatattgatatttgtttattcagtaaacgtgaaacgtgctgagtgtgcataatgtgtaaaactttgtgctgtacattttggagaaaggagaaatgaatgaatgcctcttcacttttgtttattttttaacattttagtatacctgcattctgttaggaggtttcccatgtcttatatttttgtaacctcacaaatgcctcatgagactaaattatccccattcttttttttttttttttttttttccgagacggagtctcactgtcactcaggctggagtacagtggtgcgatctcagctcactgcaacctctgcctcctgggttcaagcaattcttctgccttagcctcccagagctgggactacaggtgtgtgccaccatgcccagctaatttttatatttttagtagagacggggtttcaccatcttggccaggctggtctcaaactcctgacctcaggtgatccacccacctcggcctcccaaagtgctgggattacaggcgtgcgtcaccacacccggaatcttcatccctcagataaggaacctgaggctccagtggtgcaaataacttgcacatggtcatgcaaccagagagctatggatgtagaatgaaacagagattttgctacacccaaaattcatgttctttcctcttatgaagggagttttgtgatgttctttaattctttgaggagcctacattgtgcttggggaaacagagcatagagaaatcaatcatgacactattgaagagttagagaagaggcatgtacagtgtgccttgggtgcctaaggatggggaaatctgttctggtgcagaaaagagaggagcggtgattgggaggagggctagagaagcttttacagaggaggtgcaggtgggtgtttacactgggcccagggaccaggaatctgccagcttggatgagggtgggggtgactgttaagggtcatcacattgggaaggaggctgaggtgggaggatggcttaagcccaggaatttgaggcacaagccatcgggctgatgtgatgctatgattgtgccactacactccatccaggctaggcaacagagtgagcacctgtctcttaaaaaaaagacaaaggttatatagttttaagtactaagcttctgaagctgagctgttggccagggaagcactgattagcattagaaggtggataaaggctcaaagcaaaggctgggggtggtggttactagggcatcaaatgccagttcaaagcaaggctcagagccagagttgggaactgagattgtggcggatttcaggcccctataaggtcagttgagtacagagaaaatgcattgacctctgtgctcttctaaagcttgagttggagaagttttgtaagtctagccaaggacagtgatgacgggaagaggaggtgagaactgatgatacaggtggtggaaaaagggagggaggtctctgtgggccagggtttggggacaggtgaacagtatggcagggaggtcaactacttgaatcccactgtttggcaccctctctccctcctccaccatggaaggcaggatggaaagaaaggagcctctacttctggttttggcataggtcagtgtgctggaaaggaggagcaggtagccagcaggatcattggagtgatgaacccctcctctgtaagcagcccagtgccataggcttttcaccctggacacacccacatcgttgtccctgtgtaaagcatccaaccctctgcctggtgtggtctcatttagccattggaccccataagttttctgggcacttcctacccctccaagggtcccttgcttcaggctcaatggagtgggttgaagttggttgtaccctggtgatgacctcaggagacagctggccatgctcccatggcctccacacacaactcccgtatagagggtccgctggtgggaacttgtgtgcttccacaactccacacagagctggggtgggggggtggggcggggctgagcagcatgagagtcaggccgtctccagcagctcctttcaccaaacaacttcacaaagggcgaaaaagtaggtcctgagaaaggctggaagcaaaggggagcacgcttaggtagtaagcaggtgcattagtctaattgctcttctaaaattaatggggctttttatctctgaagcactcatatgattcgggaagaaaggtgctggtcggtcgagggagaacctggcttccctttagacatagctgcccattggtaaaatgatctctccctctctgttttctcttttacctgcaggtcgacagattatggcaccacctatgaaaagctgaatgacaaagtgggtttgaagactgtcctcagttacctctatgtcaatccaaccaacaaaaggaaggtaagagactgggtcagtaggtcctgagcactcctgctgggtagctgtgctgattagggccagaggttaaggaaaaaactcagttgtcattgaatcatttacagaggtctggtttatatgctgggaacttcataaacgctgtttgtaattctaacaacaagcttgatagtaataataataatagtgacagcagcagtgatagtaatgccaccagtaaaactatgtacctatgtcttatctcagttatcgttacaatgaatctatgggatagaaactattatggtccccattttgcaagagaagctcagagagatgaagtaactttctaccctgaatcagatggtggtaagtaacagatctagaatgtaagcatgggtttgctcagcttcagagttgagtctttccacagccttcctcttgctggtacattttttgagaaccccttactccaagggagattgtttctcccacgtgaaggaaagaaaggcagctcctggcttcttcaacttgatcctgagctgcttctgaggcagagggcagaccagactcctctggcacctctgcttctctgctttcctcttgatttagcagccaggatgaaatcatataaggtcagaccttggccatggaaatctactgagaggaggaggcctggattctgtggaacaatgggcagttttagaaaacaaatactgcaccatgtattatctttggggagatgtgctctttctccagctaagaaagcactgctatttagaaacgtaggcagacatgattcaaatacatgcaccaaaatgaccatattaaaggtcattttaatatttctaaaaggctaaaaaaaaatggcaccaccaagctctcctcttgcaatctgatttgcattcccccgtggttttgccagtgctttcttcctcaaggtaagctcaggagcaagcttcaaaccattgtgcggatgtctctgatttctaacatggtagagtccaaactgtggctgataattatgactgtttatgctgctcagagcagagcagcttttacctgagccactagcagaataatgtgcatccatagactttctcctcacctccacctctagtgcccctaagtacacccagcaaagggagggagcagaattgttgacttatggttcagcattggtgatagatagccaaaggatccagttagctctagggactctcaggccctagactgtgcccactagccaagtgccaaagctttgatcatcaggctggctgtttaggcacctgttattgattttatttgagtagtttcttttttctttgtcccaaagcattgccattttcacatctttcagtatcattatttaaattattggattttagagctagaagaaagcacagatttcacctagacaagtggttattaatagtttcttttaatttgtttattttaaaattaacatataacattgtatgtgtttatattgtacaacatactgttttgaagtacatatgcattgtggaatggttaaatctagctaattaacaaatgcagtaactcacagttactttgtggtgataatacttaatatctactcttatcatttttcaagaaaataatatattgccattaactatagtcatcatgctctacaatagatatcttgaacttattcctcctatataactgtaattatgtattttttgaccaatgtctcccaaacatgcctcccctttaaccattcgacccctgttaaccaccattctattatctaattctgagattaactcttttagattccacatatgcgtgagatcaaatggtatttgtctgtctgtgtctggcttatttaacttagcataatgtcttcaggttcatccatgttgtcacaaaagacaagatttccttttttatggatgaatggtattttattgtgtctacgtaccacattttcttcattcatccattgatagacacttaggttgatcttatatcatggctgttgtgagtagtgctgcaataaacatgagagtgcagaaatctcttggacatactggtttcattttctttggatatatacccagtagtcgaattgcttgttcatatggtagctctatttttaatttttgaggaactccatactgttttctataatagccatactaatttacattcccaccaacagtgtgcctaacagtttttggactgcaagtcttttacacatgtgattaaagttctaggtggcctctctagaaatatgcctatgccacaaaaattttcatacattttgaggacttcgtggacacctcagatcccactcatgaacccaagatatccatggagtctcggttagaaatcatttttccatgccaacaacattttacagatgagaaaattgaagcaaaaaaaactcacatagccagatagaaaaaggagccaggattagaacccaggactcttgattgtcaggccagatgtatttgcatcagctcatcttttgcagcttttcttcttgtacagtgatagcgtaggggttcaaaattgctttatgatcttgaattaaagcttggtgccatgtccttgatgggcacatgattaaagttgactgaatcaagccagcagtgatggttttcagttcttctcctgcccttctcccttcttgagaaggaagcagaggcccacagaggacaactgccccacccagccaactcaacaggttaggagcagccttgtcagttggtctgatgactcctaatttagtgctcctcccatcccacacaagtgccttgagcatactggatctcagtgggcatatgcactttgggcgaagcaagaactggatatttggtgcatgaaaagtgccctacagcgctgatctctgtcttgtatctgggccacaacagaattaatcgtattttcatgtagatgattgataggccacttttgtgaggattttcctaagtggctcgtgaaggtttgtacctgtttgtatctgttttggaattcatctgtcatgtatgtttcctcttcgaaaatatcataatgatgtttctttttgtcttttgctgtttttttctactcctgacagtctgaactctccttagtgcaactaagaagttcttagaagtgatagagacaagggatggattaaggcagattctgtgggttggaaggaacgtagagttgagatttggctctcactggcacggggataccacctccatttatccttcctcatggtgacattcaggcagtgggctctcaggagccatttctcacagaaactagtgctcaataaacagaagttaggcctattttgttgtctggtctgagaaacatcaccaaagtgtagttaactcccatctgggaggcactgccacccagaaagttaaacatacagacattttcttcactcagattggggaaaaataagcaacaggccaatggcatggattttttttttttagaaaatagcaatagaaattaacgtttgtagccaggcacagtggctcatgcctgtaatcccagcactttgggagactgaggtgggcagatcacctgaggtcgggagttcgagaccagcctgaccaacatggagaaaccctgtctctgctaaaaatacaaaattagccaggcgtggtggtacatgccgtaatcccagctactcaggaggctgaggcaggagaatcgcttgaacccaggaggtggaggttgcggtgagcagaggtcacaccattgcactccagcctgggcaacaagagtgaaactccgtctgaagaaaaaaaaaagaaattaatgttcataagggtcctacatgatctaaagtgctttcctcatcatccaagaaaaaatgaaattggattcattttcattttactaagtggtatgtattgtaatctgagcctcttgatgttgacagtgcacacgtagtctacattctaactttctcgtaaccagtatattcagcttagcagaaatcccccttctccagccacttaggcaaaaagaaaatttgatataaataaaaatactcttatttgttcctttattagtctagagctctggaaccatgtaacacaacttcgtttttaagtttccttctttacgtcttcaagtttaaacttatggtaatatggatactcatctcagcttgtgttaggcaagatggtttagatttggttagtacccaaattatctgtagcaacccatttcatcagtcagccaatggcagtagtctctcgtggatttttgagttcatcttgtagaagcacttgcttttcacctaatgagttatttatttaacagatggctgctgctttccttggaggctatgaatacatcaaatgagatctgttgcccctggcaaaacagtaaattgagtttgtattcatgtagttgctcccaaagctaattgttgattttttaaacaattttgaacaacataaaattatccaaatactgatagttaattaaccattaagttggaaggaagcagaggtgttaacctgtgtatagtttccttctaccagtaatcatcccaggtagcactaactgagcagctactatcctaaactcccttttaagagttttatccacatgatctctaatcctcccagccactttgaaagtaggcagggtaagaaaatagactttgataaattaccccaagactatattgctataaatggtagatctacagcagctttcccaatgggtttattttgaggacaaattagtcattcagcaattctgggcttcctggaggtagctgagatttagactgggagtactgtctttatcacaggctgtgagcagggtataatcatttcatctagcgggttttataattccctgtctaaatgagagtattgatatgaaatgcacgaagctgcttcagtcaaagttgtcctagactgctgttctgtggcatggtggcatcagcattattttaatgaccttgacccactctgactatttgatgtgaattttgtatacccggttgtttgcctttctccagccattggccaattaactcattgcccaggtttgagcccaacttccttatgggagcccagaattgctgaatgtgtctggttggtacttgaagatgaggaatagtatattagctctggaagcaagagagtgtatggtttgcctcccagaggagtggctccattatggtggggctagtaagctctagctcacagcttctccttccccttgcatgagataaacatccctgggttcccagaactcattactgtcagttgtttcttgtcctcaggcccatgcagaatggcaagtgccaaggtcaagtctgctgtgctttgtaaaaacaggctgaaggctttgtgccttaactagagaggagcctgactcccatgggcgagcttatttgagaatgaatctttgagtggacagagaaatgcaggcatgttattgtctaattactctggctccaaagtgactgccacctgcaactttggagacagtgcattggaaatggcagagagcacacactggtctaacagccagagaatgtgaccaaattactatagttagaggtacatgtctctctctctctctctctgtgtgtgtgtgtgtgtgtgtgtgtgtgtgtgtgatgaaaactataaggtctgacatcagtataggctaatgagttctttctattgagcttctaataagttctaggcactgggctaagttccttactacactttattctaagttttactattaatctcctgagcgtggtagttttatcctcatttgacagacgaagaaactgaggctcaagcagatagacacttaattttggaaaatagctaataagagggggtccaggattcctgttcacctctatctgcccacagggttggtgccactaccacaggtataaagaccaggtgagttgtaatcatcactctattagtggtaaccctgttgcctggggttttctgttcattagtgttagaggattagcagtttcttggaggaggaggggaatattacatcctgcattcctaattgatttaccagtgagaaggataattactttcaggctaccctgcagaaatatagtgggaattaccagtgagattcttacagtgagcaagctgcttttgtcaagctgttcgagaggcaccgcgtgtgtggtcggaggctggttatgccaatgtcgctctctggatacaacacataaccctgaactatctttaaaatgctggaaaacctttaaccaaaacatagcacagaattttaaaataccagactcctaagatagttgcagggtcagggaaagtaagtggcagggtaacacattttcagtccacaaatattaaagtctcttacactaaagtaaggccaaaaaggtggaaaggtaattttaggctgttgaacaatcttttaaaaatgtctacctctgagcaaagtatgttttgagggagggagtttcctgctttcagaaatgtgcaattcacctgggcagacaagatgcaccgaagaaaatgactgctacatagacctaggtctcaaattcggatgcatgcaggggccagaagataatggcaaggaagatgtgggccaggtagagacttggaagcccctctgtaaagggccttttgccattaggctccaaatgactgttgtcatgtgaaaatgagggcccagcatagccagttattgttaacatccttgctattatgttctgagttttaaagatatttttctatatagattttaatatgaaacatccgtgttttgaaatatttaggaggtggagttcagggtttgggggctaacaggctgtaccaaatctactgttatccctgtttccagttggcagcatgtggcatattcaagtggtaactaagtctacaggtgaaaagttggtatttgcaaagtggtctttagagtcacaggagaacacttcgtagactctcttgctggggacctgcactgatacccttatatgtgtgagagataaactaagtcaagtgtggcttacaaagatttccctttgactcagaggaagcacatggttgatccttcagtgcaaagggactttttgtgtcattgtagggtaagaccactagagtaggggtagggggcagatgtctgctttctgcttctggttttgcccctgagcaactcagtgtctttatataggccacttccctcccagggctttcatttctctatttgtataatggcaagtttatgttctatgcttttcgaagccccttccagctcaggtcgtctggatggccaccatttagacagtgtttttcagagggctttgcagtaccatgtgatgatccacatttaatttctgtggctcattggatagccagttgggaagtccttaggaagtgtaatcctcatagctcttagttatatgactacatgttggctggccaagcccttaggaagtgtaatcctcatagctcttagttatatgactacatgttggctggccaagccctgttacctgggctatcttttctgaagttacagttccttggtcaaaaggtgggtccctgaaacacactggctctgctggtagaagtcagagcagcagcactacttgctggcacaattaaggggttctatcagcatgagccaatgcaacttcataggagcatcacacgcattacccagggacgcttagccctcctcctgcaggcaagggagttagagatgctgcctgttctggtaacccagaatagaggacaccaagtgttgcaatagggagtgggagcttagctctgctgtaccacactccctccttcatggccattgacttaatgacacatcaaccagacatctctcctctgtgagcctttctttttctcttcgtaacatgtgcataataacctgtctgttaaggagcaaagaagtctctgttagtgctagtatctgtttctattcataaaggcaacaagtgtctatgataataatgacaatgatagtaaaaataataatacaagaaggagctagagttttttgagagtttgctatgtgctgaaaattatcctaaatgcttccaatgaattaactcatttaatacttcaacagaaactctatgatgttggcacgatcatcatgcaatttgcagatgatggatatttggtactgagatgttagccatttgctcagatttgttgctgatggtcatgtgccttggtctaatatgctcatttaactcgtttccattcatatttaattcttagactcactgcatattggagcttaaagggctctcggagactgtgcagaccctcattgaacagaagaggccactcagggacttgtctgaggtcatagagtcacttgcctcagagctggggcgggagcagtttacagactcctagtctagtattctctgccaagcccataaggctggtgacagctggagaattctgatctgatagagaaccttgactgagaataaggtgagcacaaatatgaagtggtaggaaaatagcattccacgtcggtcctgctgaatgtcagttgtgtctctacggcttacagagatatccacagcctctcagtactccactctcaaagcccaaagggtattgcagctggaatctcatttcaaatgaacctgggtgggaaaccaaggacttgcattcaaaactgcccagaatggttgagcagcatgacaaaggccaaatggcttgataaaggagcaagaggctgggtccctgggaggtgggctatctgggaaaagaatcaggatttctgttttaagcctttctgttaactacctgtatggcactgagaagtcatttaaattctctgatcctcaccttctcaatttgtaaaatggggataaaagatcacttacctgtccccttctttcagaagcataactagcatgttagatatattgtatgggagggttgttagcatttttttatgaattgttcttaatactgtccactagctcccatgcctggccagcaaaatgctttaatttttttaaaaaaatttactttaagttctgggatacatgtgcagaacgtgcaggtttgttacataggtatacatgtgccatggtgatttgctgtacctatcaacccgtcatctaggttttaagccctggctgcattagatattcttcctaatgctctccctcccctttcccctgacaggccccagtgtgtgatgttcccctccctgtgttcatgtgttctcattatttaactcccactatgagtgagaacatgcgatgtttgattttctgttcctgtgttagtttgctgagaatgatggtttccagcttcatccatgtccttgcaaagaaaatgaactcaaaatgctttaatttttaactgtagaacacatgactcggttgtctttttctcttttttaagaaaagtaaatgccgaattaggggaattaacataggcatgttgccttatgttagaatgaccaggttaaaccacttaatttttttgtccaaggcaaacatgatataaggaatatgcactaccagaataactccccctggtggcagaaaccatgctccaagcccatctgaggcgctgactgctttttgccccttttcaatgggcattgccctgatagtgtgaatcccatcaattcagcagatgagtggggaaatgaatattttcccccaaacctttaggaaaaagcaggtttttgtttgtttgaggcttttgggtttctttttcctcttttgtttttcatttttaaatcttgaatgttattattgaaggctgcaggtatggcagacaatgagcaggtgaagaaccaatggtaaagtgtcccaaaactgacatgttagctaacaggcttctgaatgaattgctgtggtccacagaggaggctggagaaggtagcaaggagatgctgtatcagttactacagccttaaaacaaagttggtgtctctttggactttcaaattgctcctatgcagcttattttatttttgtttaatcaaataagagagcctttccatggcaaaaaataaagaacatatctaggaaaaatgagagttgtaattttgtttgaaagaaatgagctacagaaacagaaagattgttactactgggatggagctggcatcaagattgcagactggaagccagggtccggctgcctggctgtgcctttagtgctgaccgcagtggctgctgggcctcccctcctgagctgtgagctgcctgctttcaggcttccttggagaggatgcagctcccagaggcttggatttttaaagagcctcatgtcctgccttatccaggaggcatgctgccactttctctttccccatcttcttccttgtctcttaaaaccagacttgctgactgcctgagaaagactgattgttctgctcatggagagaaatggtcccacttttgttaattcacagccatctcattttttcctgcttcataaattaacatagttaccaagcggctagagcagtgttttggagatgggtttaggggaaaatgtatgaaaggaagaagtaaaaaaaaaggaaaagaacaaaacatgaaccaaacctccctcatttactgattccacgtccaaatgtttttcttcttggtgtatccagaaaaagaaccagaaaagactccttgcaccccaaaagggaaagtatcagatcccattagggctaagaaagcagaaaggagaatcaatgagggggcagacaccggtctaggagtttccatctgccttcgcaagtgtgacccagcaatggaatggctgcgaatgtgcttccattcaaactcatcacttaaaggaaaaagaatctagagtaattcttggaaattcagtcttaagtcacaaatgtctctttctcagcaaatataggtatatggttctttgtataaattactgcagtgtgctctggccaagaatttatttaaaggctcattaaaatgattactagttttttcttttgcattttatttgaaaatgggaagaatataaacctatcctggctcttctccaaagtgccctttagggtttgcatcgagtatatcgtaatttttttaaaaataaagataataatgatttgcattaagattatccagacattttagaggaataataaaaattagtcacttagtgtactttttaggtgcttatgtttgctcaatatcttttaaaatttttatttctattgttgaagtttttatgtgtctgtatgtgtgtatatgtgcatctaggtgtgtataaaacatttttcacaaagtattatgaaaacttgagagttaagaaatatgaaaaaatgtctgtttctcttccgtgtgaactctgatttgggctgaaccaaggatttagggaagcttgtattcctggatggccacatacaatgctggttccatttcactgcctggctcatttagccatcatagttgctcaataaagcctctgagaagggattccatttgaggttaaatggcagccaaggacacacagtaattgtttaggcagagccagtgataggagcaggaaaatcaagggtgcaacccagatgagaggtcattgatctgtatcttgagagagtcaggctggataagagaaaataacaacacagtgaacattgatgggggcttctaagccaggcctgaaggaccagtggagatcatgggagttttacactttgaaagcctttaaaaagaagacagcaagctgagcacggtggctcacacctgtaatcccagcactttgggaggccgaggcaggtggatcacctgaggtcaggagttcaagactagcctggccaacatggtgaaaccaagtctctactaaaagtacaaaattagccaggcgtggtggcgggtgtctgtaatcctagctactcgggaggctgaggcaggagaatcgcttgaacccgggaggtggaggttgtggtgagccgagatcgtaccattgcactccagcctgggcaacagagcaagactccgtctgaaaaaaaaaaaagaagacagtgtgtatccaagtctagaagagtgaatgcagcaccaagcttgaagaaggatgtcatgctgtggcataatcaaagctggtaaaaggtagaggcaaaaatcaggcagaatttggaagaaattttgggatttggaaaaggagggaaaggaaagggcaatctgataaggtaatgagagtatagaggttttaagtatgtgggttttagcagtttcaagttgggagagagaatagggtacgactagatattatagactcccaaaagcccagggatggagttaggactcagggcagaaggacctggggagccatagcaggcttctgagcaggggcttgaaagcatgagacctgtgtctcaggaaggctggcgaccagcctctcagactgatgagatgcctgtgttaagcatcccactctgtcctctcttctcacatgcactgccctcactagaccttctgggtgtgttttctgaacatcacaagcaagagcaattttagcaaagtgcttgggaaggcaggatgatgtgttcttcctcatgttccaatgcacagccatatagcaaatggatctcactgcccctgaggtagagatatctgtaacaaatacaatcaccaccactggtgaaagaaatgactcgatttttttttcttcaaccaagcagagagattgctactggcatgcatgcctcctcgcccccagttcgtgcccccattaccagcccaaggtcagaatgacagacctcagcacttggtacacactctgctggtgagcgtgtctgggcaatgagggccaagtgtcctgggatcctcgggtctgccagatggctcaggggtgggtttgaagccagcaagtctctgtccccacatgttggggtctgagctggcagggaagtctgagacattggcctcagtgacaaatgaaggccttggtcagtgctgcagccctatgtcgagggcctcctgagagcagatgcagacagtcagccctgtcatcccacagcatgaatctaactctgagaaatggcttgggctgtcttatgatgaccaaacagaggaaacaaatgaatcagagaggacagaagtgtgagaaatgcatgtgattatctccttggcagggcagccagaggtaggaaaagtagtggtcagtttagagctccttaattattcctggtttcccccagggcccaatgaggtagtgtgatgtgcaggaaagagcgtgcagctcatgcttcagttgctgtgtgaccttgaacatattacttgacttctctaagccttagttgtttaatctgtcaatggggctcacaatagtattttataaaacaaaacagctttaataattaaatagcataatgtatatagaatacctggcagagagtaggtatgactggcttttcaccagttaaatgagcctctcttcggctttcccccctgctcagtgacacctcccaattcctaggcactccatatcaatgtagctggcttttctattctgggagaaggaatctatacttctttatatcagcaaatatatagaaaaagttctttcaacttccaaaatgaaaacaataacaaactcctcctgcatccctcctgtttcatcatttatttacccatctgcctgtgtgctctgtagcaggcagggcccagtggccctgagcttcaggtgcatcccaacactgagttggtcccaaaggttccaagccctagacagccctcagcaacaggccagccccattgtctctgggcttcaagctggcccctggggacacaggctctaagcctatcccagcagactcaatcaacaggtccatcaatgtggatccaggctgcaggcctgccagcctaaggactccaacagcaagcccacccatggaccatgctaaccagtctgtccagaatctctggatggcatgactgctaagggaatttcccagacaaagccagcgtgcaaaaactggaataagtacctatttttttcagttacacagacaccagaatatagccacaagcatcaagaacaaacagggaaacatgaaatcacctcattaaagggacaaaataaaggacagtgactgatcctaaagaaatggacatgtatgaattgcctgacaaagaattaaaaatagctgctttaaggaagttccataaatgtccagaaaatggcagagaaataattcaatgaaatgaagaaaacgataaacgatcagaatgggacatttaacagagtgattgaaataataaaaaaatcaaccagaaagaacagtaattgctaacattgtgcattgttctaataaaaaaaaaggtataaggtaaatactgttattcttaatttgagagaggacacattgcagcaaaaagactaaagctttccagttgggcagtggccaagtcaggttttgaaaccagattgtcaacttttaaacatatgcttcatagtaataataaaaataaaagaaaaattaatactgtgtgttattggtctctcctggcttagatgggtaccatgaccctctagaacatctctttataaatccatgaaaaggaatatagatgtggaaagggatgtgtttccttctagtccagcaatgccatggctccatgctgagaagttctgaaaaatattccctgccgagagaagaagtcacgggagttgctgagttttctgaaacataggacaaacaatacaccggggttgatgggggcagtaaatagcctttggaaaatgccttagtgttcaataattcataagagtaagcatcagtgccaagcactggcattcccacttggaagcccccatagggcaggggctggctgggttgctgagggcctcttttcacttggccaagaagctactttgttgatatcctcactctacctcttagcagctgggggcttaggcacatcattaaatacttataagcttctctttcctcgtctgtgtaatcgggatgatactagtacccatctccttagctgatagaaggattaaatgagaaatctttgcaaatacttagtgagtgaccaacccgtggtaccctgtaagtaaatactatttattattactcttgtcatcattgtaatctcaggacaatgggcccttgaaaacaggggataattccatgtttgatctacccatttatgatggacactcagcctgggcaattattgctcttattcaggcatctggtgagcctttggagaaatgtggagctggcaagtgactgaaagtttgtctgctttaaagctctcattaaattgatgaagaaactgagtctcagggggggagtcccttattcaaagttacacagccacttgatggcagaactatgattttggagatcaggtgtctggcttcaagcccagtatcttcctgttagattacacagaaagacactgcacaatacaggcagagctgggcagctaggtagctacagaagaccctgacattagggcgctttgagattctcttatctttgttcagtaaacctaggatttccagggcactggcagcagaaacggccaggtcaggctttcaaatcgtgtgactctggtggagaaactgcccaagggtataaataaggtcttaaataagacctttaaggctaagttgtactcagagcaaccaaaggcagcaacatcaaaggagagtctgagtcagggttgaataaagagagaaaaagtccaaattggagaatgtctgttgatatgcaaaggctgagaaaagactccaaacagaaatctcaacctctagaaaggctccagaaagactggaaccaacttaggtgatagactgtaagacaggcctgagaatagtgttcaggactgagactaggaggctattgacagcctgtttttatagggcaacttttgcttatgcagggacagtagcaggagaggcacttgactgattaaagcagttaggccaggccagacaagaaggacagtcacaaaagaagaatagcatgaagataggatgcaattatccaaagtggtctttggcctgaacctcaagtcttaaatcatcccaggggaggcagtggcagcatagatatgcatgagagatttcctgactccactctggacctttggagaggagtgagctgatgtcagagcagaaacttagtgtgcacgttagctctggaaactcagcttgaaataatgaactgctggcttcctggtctcagccgccctgccttgatcccaaatcacagaacatcagcattctatagctcaaaggagatcagctttgcagacccaagcttgtaaaaagttatttttcttggaagattttcttggcattaatagtttctacagaacccgtcttgcctcagctggaccctaagcaaattgtaaatgatttggagcattccctaccactctcttctctgaagtagctataaagattgtttctctttagtctcacggctgcttgcatttgaatgtatgcatgctgagtgtaccctgaagtcagggctggcacatgggcctgaactatcaacccctggaagtgagggagaaagaagtggtgaggaagtaggctgtaccacagttatcccctcaaaaagtgacacagttagaactttctatatatcttcaggaatcaccactttgatcttgccaatccttactcagaaactttcagcagcttccaggtgtccacaggagaacatctacctcattagtctggtgttcatgtggttctgtctacgttgtgtgattctcagcttatgtgttcagccttttctttgtcctgctctatagtgttagttctatgctttgaacaagtttcattttaacttttaatttttattttttagaaatgaggtctgtctttgttgtcaagcctagagtgcagtagagcgatcatagctcactgcagccttgaattcctgggttcaagcaatcctcctacctcagagtcaagagtagctgggactacaggtgcacttaccactcccagctattctttttaattttctttttcttttgttcttttctttctttatttatttttaaaatagagacagggtcttgctttgttccccaggctggtcttgaactcctggcttcaaataatcctcctgtgttggcctcaaaaagtgataggattacagacatgagccactgtgctggcccccttggacaagttttaattgttccatacctcaggctactttccataaaataggaatcataatacttccctagatcagcagtgatgctttggctctgcaagatacagaaaactctgcctgaaatggaagcataggaaacatatgagttcatgtgatagagtctcagggtaggtagctccaggttgttaattctttggttcagtgacatcttggaagacaaagtcctttctatcttgctgctctgccttctagagcattggtctttgtcctctggctattttttttttttttataatggatgacaagatggttacagaggttctggcatcacacccagacagacagtaaaatgtacagaagaccaatagtagacaacacattttcagatggagggaactgcttccagaagctcagagctcccagcagagtaccatgtgtgcatcatgtcaggacagggtaaaccaggggagacagagtggggcccagcctcctctaagcacaggcccacacagagagggatactgtaacaaaatacaagttctgttaggaaggtagaaagaggtgcattgatggaagttatataggcaaccaccaacgcctgctgcactgccttataaggttcatttgagaatcaagtgacacgagccgtgtaaatcatgtaaatgttaacatctctgctatttattatcattcccatctttatgctgggtctcccactgatgtgtgtccactccacctatcaaaatcttattcctctttcagtgttcagcttaaatcttccttccttttttgtcttactctgtagcccaggctggagtgcaatggtgcaatcttggctcactgcaacctccacaacccgggttcaagagattctcttgcctcatcctctcgagtagctgggactacaggcatgcaccaccatgcctggctaatttttgtacttttagtagagatggggtttcaccacgttggccaggctggtctcgaactgacctcaggtgatctgcctgcctcggcctcccaaagtgctgggattacaagcatgagccactgtgcccggccttccctcctttttgaaattttcccagacaccccactatttcactcctatttttaaccccagatgaaacttctgtccctaattcccaaagcgctatggcagccaatggattgattgcatcaaataacataaaggaacttgaataatattgaatcccagacctcatctaccatggagaatctgattctacaggtctgggaaaggttaaggctatgtatgagacaataggtctaggcattaatgatgtataatcaggtttggaataatttttgaacttagtatctgggctttatggactgcaaaggtagcagataacttttcaagtttggtgtttaaagagcagggacagtatcttgtatgtttttgtgtccctgagtgttgcttaacacacagcctgggcacatttgtacagtgtcaataattttaaaagttgtgtatttactgaaccttttgagtgagaggatttaaatttttttttcagactctttctggatgtgcgcataagtgcactcattttatccatacctcttgtattctaagacttacaaccaagaaatgtttactggtttactcctttaccacttcttgccaaagaggtagaccagcctgcctccttatgctcagattcggtctttctgtcaagagtttccatcctccttttggaattataaccaagttaaaaggtctgactgtgatttcctttaagattgtagaggtggacgaagtcaaaattgacttaatactatctgtgaaaacagtcaaggctgggaaggggcattttttgcactgctttcctttagcagtggtgattttagcagtgagttatagtacatgcagttggagttgaaggacactgagagagattctgagcagcagaacattcagttggtccatgagtgttttctaaatgtcagtggggaatgttggcttgtttgggtactgaggaggactattaagcaatagtaaataatagcccatgacattcttactgtgtgccagagacagggccaatcatcgtatgattaattctcggagcagtcctttgacccttgtgagttaggtattataattatccccattttgcacctgttcaactgaggctaagaggttaaaaacttacctcactaggaagctgatgacctaggttatgaactcagatttgattgactcaggatttcaggctctgacccactgaactctattgagttctagaaagcatgtatcactgctttcagcagatttggagtctgtttcattagatctcaactctggctgctctttaggattacctggaggagctttaaaacatacccatgctcaggcctcagccaaggagatgtttaaatacatctagggtggggtccagggttggcaatttataaagcttttgaggtaattctattgtacttccagcatcaagaaccatgggtctagttggagtgaaaaaaattcattcatccatcaaattttatttagtgtcttttgtgtccctggtctttgcttttctggagtcattcccaggagagtgataagcattgcaagtcacaagaggaaagaggcactgattctgcccggcaggtctaggaagctcagaaggaagctatattgaagcagaggcaacacatcagtagaggtttgctgaggactaatggtggggtgggttggggagggttttctgggcagaggaaatagcacatgctgtagcatagagttgtgagaaggtaaggtgtgttcaggaagctgcaaaaggcttggtttgggtggagtgaaagcacctgtgatgtggtggcagaggaggagggaaagtggttagggaccatgtgagcaaaggtgttgggctcagtacagggctcaggagttgagattttgtttcttgagaggagtcattgcatcaggtctgtgtcctagaaagtcccttgggaaacagggcgaaggctggatttaagggaaaggtaagactgatagagtccagtatgacattgctttgcaaaagcaaaaaatattttttgccacctgaaggcctaatcatgacagttttaccagtaaattaatctattatacattcatatgatggaacatgatagaatgattaaagattatgtgtattgatatggaaagctattcattatatgtatgtttaaaaagacaggttatagaactgtatatctgaaatggagcaagaaaaaaaaatggctaacattgtgttgtagggaagagatgacaaggacctggactcctatagtgtagaaggaaggtatggaggggccagctgtgaaaatgctagaaaagtgggatcaacccaaattagtgtttggatgttgggataagaaaagaaaattttaaggtggggttccgaggatttcaacttgagtggctgggtaaatgaatgagagctggggaactgggcatattaacaaaacatagatggactgcagagagacaggttggtgaatgataatcagttcgatttgggcatgctgagtttgatactatgggacatccaggggaaaaggctgttaagctgttggatttatgtgtcgggatgttaggaaacagtcttgagcttaagagcacagataagtctccttggcaaacaaagacgaatttaacaataaaagctgtttgggattcttgttgttgaacataggatcaaatgcaagtaaacccagactgctatcaattcagcaaacagtttttgaaaactttctcagtgatcaacatggtgccaggtacagggatcaccaaatgaacagacttggtctctgtccaaggaaacataatctatcaagtgctttggtaacacaaaggagggactgattaatctaccatgaatgtttagaggaagatgtggcagaggtcacatttgactaggcttcaaaacagtggtccccaacctttttggtaccagggaccagttttgtgaaagacaatttttccacagatgggggcacagggggtgatttcagatgaaactgttctatctcagatcatcaggcattagttagattctcataagtgtgcaacctagatcccttgtatgtgcagttcacaggagggttcatgctcctatgagaacctaatgcctgatgatctgacaggaggcggagctcaggcagtaatgttggcctgccgtccactcacctcctgctgtgcagcccagttcctaacaggccactgaccagtataggggttgaggacccttgcttcaaaaggtaagttagagtttgccacgtggatcaatggtttttatgcattcccattgcaattggacttcactttagaaattaagcagattctagaaaatgtaggtgttaatttgaatgccaggatgccaaatatataaattcattaggagagttcactataaaatctaagttttattttaaaagataactaacatagaataagtgttttcaagtcagtttaagttctctttcatcatggccgaaagctcacattactttcgcttaccacgaggcaaaacaacattaaatatctgagtcaagaaggatggtgcatatgatacgttttccttcagtctagagcaaagtaagttcgggtcttggaagggcaacccttccccactccagccagatgcctcattccccatggctgagtcaatacaaaaagaatgagtgagtcaattcttgctcacctcaagggagcttgttgaaggtcactcagcaaagtggtggcagaatgccattgctttatggaccttgccacactaatgggcacttccaaatgatgcttccccacatgtttggcctctctcctctggcagtgcatgtgtgtgcttttacctttaattacaaggcacagcagtgcacagtggtttggatgcaggtgccagtggagatggaagccagccaagtagtagacgcttgacctggtgaaggatgacagattgacagagtttggactctggtattaccctttgattttgctgaagtttaatgtgttttcggcacttccaggactccctatgcatcacgagcccattcagcctcagcttgcttctttctttactgtcgttagtgccttaaatttttgactgggaaagaaatacatcagagagacccaaactttctcaagctgatgtggttctcagtagttagctggtaaatttataacctggaatgaggctgggctttgacatcttccaagtgaatggccttcattggtcagggaggaatgtttttcagggggaagtgttatgtgacagaatttgtttttattcagttcctactctgatcaaaatctgccagtgacttctcattgcctgtaggattcaggccaaactccacagcatggggttaaagctccttcgtaatgtacacccaatatttttgcttgccttatctcactcatactctttgaccttttttgaatttagattccccatgtttcctttacactcccccagtagcaccagtgcttatgcccatagtatcctcttaaaatgatcctccctaacttttttccacttacttgaattctaaccatcttcagggccctgtgcagaagtcagttccaagggggcctttcctgatcaccttggcccagtgtttcctcccacatttccaccaacatattatcttttaatgtttccatctatataaatatggctagttctgttatggcaggcactgagttttccccattcttgtatgcatcatagtgcctggcataatgtcttgcaggctgtcacagtgcaacatttttcttgctgccttgcgggggaagccgtgatgcaggtgttgaaggcagttccagggtagctggattgcagccacttgtcaatggttctcaatctttccctggacgaggcctgtggagggctaactaatgaagaggtcttttgcttcaggttttatcccagcttcccagatctgctttcctggtccagatggcacctgaacttggctactgcattctggacccaccttctgtgttcagcattctgctggcctctcctgtcactgctataggattaatggcttccagctgtgatagttatactcttcctctagcaccctctgccaaaatccagagtctagtacctctggctggaggagacgaggaaggaggagtaaaggagacatttatggtggaattgattactccctttttgatgctttcatcgcactcttgtttacctccctagcatgtatcttcctgtagctcagccatttatgtctttgtgtctcctgctaagtcgtaaatgccccaaggccagaaccatgcattatctgtccctgcttactggtacctaacacagtgcctggcactgggttgacattcatttcaactaagctgaaatcagtaagcaattacaaagtcagaataacccacaaaatgtccgatcaaagcaggtgtactctctgcactccagagtgaattcccgtggctcctcttatgacagtccttttaagagaacgtccaaatgggtctgaaactcctgaacactggagcttggagagacatttttaatcctttgggtggaattaccactggggaagagggaggtcaaggccagccaaactgtccctgagaccgtgaagtaactgccctcaccaaaaacctactcagaaaatgaatttcttgatgggtctccaaactgactctggtccaaatagcccaagggcaagactagaagggatttgggcatggatttgtcttgctccacaacactcgggtgggtaaaagataagccatattaaacaatctttccattgaaaaatgaaatcaggagctcgagcccgtaatcactagacttattgatttatttcatctcagtgattctttttggctctctcccccatgcctttgttaccggaaaggggtctggatccagacaccaagggagggttcttggatgtcatgcaagaaataattttggggtgagttcacagagtaaagtgaaagcaagtttaaggaagtaaaaaaacaaaagaatggctactccataggcagagcagcagcaagggctgctggttggctatttttatggttatctcttgatcatatgctaaacaaggggtggattatttatgacttttccaggaaaggggcaggaaatttccagaaccgagagttcctcttccttttcttttatatatatatatatatatatatatatatatatatttttttttttttttttattatactttaagttctagggtacatgtgcacaatgtgcaggtttcttacatatgtatacatgtgccatgttggtgtgccgcacccattaactcgtcatttacattaggtatatctcctaatgctatctctcccccctccccccaccccacaacaggccccggtgtgtgatgttccccttcctgtgtccaagtgctctcattgttcaattcccacctatgagtgacaacatgcggcgttcgctttttttgtccttgtgatagtttgctgagaatgatggtttccagcttcatccatgtccctacaaaggacatgaattcatcactttttatggctgcatagtattccatggtatatatgtgccacattttcttaatccactctatcattgatggacatttggattggttccaagtctttgctgttgtgaatagtgccgcagtaaacatacgtgtgcatgtgtcttttcaatgaaataaaagaggacacaaacaaatggaagaacattccatgctcatggataagaagaatcaatatcatgaaaacggccatactgcccaaggtaatttatagattcaatgccatctccatcaagctaccaatgactttcttcacagaattggaaaaaactactttaaagttcatatggaaccaaaaaagagccctcattgcccagtcagtcctaagccaaaagaaaaaagctggaggcatcatgctacctgacttcaaactatcctcttccttttcgatcatatagggtaacttccaggtgttgccatggcatttgtaaactgccatggcactggtgagaatgtctcttagcatgctaatgcattataattagcaaatattgagcagtgagtacactagaggtcacttttggcacatcttggttttggcaggttttgaccagcttctttattgcatcctgctttatcagtgggactttgtgacctgtatctttgtgacctcctgtctcattttgtgactaagaatgcctaacctcctgggatgcagctcaacaggtcttggcctcattttactcagcccctattcaagatatagctgctgtgatttgcacacctctgatacccttgggccatgtaaaaattcttgattttataatataaggaagaatagaaaatgtctttcacttcatttgggaatggtcttcactacacctggcccttgtttgtgtggtctcttcagaggaggctaactctgaaggtgtttttactgtctctgtgttgagttaggctgtgcacatcttctttagggttctcaaggccaccagctttgttcccagtttatacaggcactcccattagagtttctgccactcagctattgcttatcaggctgagaactaccactctcgttactactatccaattaaaactttcaggatttggactcttctcttttcaacaagaacaccaaaacttggacaacctggcttaattccctgggtaggtctagattatagagaagcaaaaatgactgtggcattggcttccaggaataagcctctttctcttcttgctctggctccaaagcaaagtaaaaaaaaaagctgtcaactccccactaggggaaagagtccaggccttggaaacaaaggcctggctggatgtctggaagggcttatatggggaattgagacttagcttttgttttagcctgatgagtctggagtattgagaaaaaaagacacaatttaatgtcttaatagattatcctgtgtattaaattctcaataaatctccctgctataaggacagggattatctttattctctctttttaaatgataaaaatatcttgtattcactggagaggttgtgcctagacagtatgaggatcaaagagatcttactttaaaaggccagtgctctggaaggagaatcatagatggaatctgaccagtgaaacatttcacacattttcccaggacttctaggagtcaaacgttaccatttcctagagcaactgctgaaatattttggaatattgaaaatttgaagagttcagtattaatcagatgaaaggaatcgtaattaaatgtcttcccaccaagaagtcaccaggcccagatggcctcaccagtgaattatttcaaatgttaaggaaaactagatcttacagaaattctgttagacaataggagaagaaagaagactttccagctcattgtgagggcagcatcactttgacacaaaacttgagaatgacattataagaaataagaattacagattaatcctttttatgaacatagatgcaaaagtccctaagacattagctaattaaatccaacaaaatataaagataacatattacaaccaaattgggtttattttaggaatgcaaggtcactttaacattcaaaaatcaaatgtaatttgccacaattacataataaaggagaaaatcatgtgataatcttaagcaatgcagagcaagtatttgataacactcaatacccattcatgataataactcttatccaactagaggagaacttccttaatgagataaagtgtagtttttaagaagccaaaaacctacagcaaacctcaaactaaatgatgaaatcttgaaagtttccctcctaagattagcaatctaagattagataaggatgcccactaacacctcttttattcagcattataatggaggttctagtcagtgcaaaatgcaagaaataaataaaatgtataaggattggagggaaaagaaataacaactgtggaaaattcaaaagaatctgtaaataaacccttagaattaataagtgaatatggcaaggtcactggatataatgtcaatgtataaaagtattatttttagacaatgcaacagaaaataaatataaaatatttttttttaagagacggagttttgctctgttgcccaggctggagtgcagtggtgcattcttggctcactgcaacatccgcctcttaagttcaagcaattctcctgcctcagcctcctgagtagctgggagtacaggtgcatgctgccatgcccagctaatgttttgtattttagtagagacggggttccaccatgttgcccaggtctcgaactcctgagctaaggcaatccacctgcctcggtctcccaaagtgctatgattacaggcataagccactgtgcccggccaaatgtaaaaagagttctatgtataatagcatcaagtaatatgtgataaatatgttaataatatagtaatacaatgaatcaagtcatgaatgctgagtggagactcaatatagaagactaaaaaaattcttgaaaacatttcaaggtggcctaagtaaagagaaaaccaagtttatggtttatagaattaattttataaacatccttatttccccccactctcatctattgattcaaaacaatctcaatggaaattctaatggactttttctgtggaatttaacaagctgattctaaaatttataaacaaatttaaagggtgaagaataggtaagagaatcttggaaaaaaaagttggagatattactagacataagacttatttaaagctgcagtaattaagaaagtctggtattagcgcaaagatagaaaaatagaccaataggacagaataaaagtccaggagtagatccatatatatacagttgcttgagttttttgcttttcttttgagatggggtcttgctctgttgcctagggtggagtgaagtggcatggtcatagctcactgcaatctcaacctcacaggatcaagcagtcctcccacctcagcctcccaagtgcatgccaccacacccagctatgtttggttgcttgatttataacaaagggtaacactgaaatgcagtgatgaaaatgtggtcttttaaaaaatataactaggtctattaaatatcctaatattaaaaaataataatcttgactcctcttacttcgacaaaaaacatttcttctggattgcagatatgactattaaacttaaaaccataaaacttttcaagaaaagcataagatattatcttcatgacttctgtatgggcaaagatttcttatataggcttctaaaaaattttgactatagaagaaaagattgatatgttggacttaaatgaaataaagaattatttaagaaaagcattatataagagtgaaagtcatagcatttaataagagaagatggttgcagtgtctgtatctggcagagtactcatatctagactacataaataatgcctataaatcattaagagaaagactgacgacttaaaaaaatgggcagaagacttaacagacatttcaccacagaaggtatcttaatgagcaataaacatttgaaaactagctcaatttcctttgtcatcaggaaatacaaaattatactacttgagatatctttttataaccaacatattagctaaaatgaaaagataatatcaagtgttggcaagaaggtgaggcaactggaactttcatgcagtactgagaagatgtaacttgttataaccactttagaaaaccggcagtgtctcctaaagctgaatatatacacaccctgtgacccagcaattgtactcttaggtataatatcatacagaactacatatgtatgtgagccaaaagacatgtacaagaaaggtcatagcaataaaagccacaatctggaaccaactcacatatttgtcaacagcaaaatggactaataattgtggaataattcatccaatgtaataccatacagtaatgagattgaatgaattactgctataagcaagcaacaacatggattaatctcatagagtattgagccataaaacgtcatagagtgttgagataaaaaagaatacatatcgtatgaccccgtttatataacatttaaaaatagaactaatcaatgttaaatagaagagcattgtggttacttttgggagagaggacatacaaggagggtttctgaggtgttgctaattttctgttttgttttgttttgttttgttttgtttttgttttgagatggagtctcgctctgtcaggctggagtgcagttgcatgatctcggctcaggctcactgcaacctccacctcctgggtttaagtgattctcctgcctcagcctcctgagtagctgggattataggagtgcaccaccacccctagctaattttttgtatttttagtagagatgagttttcaccatgttggccaggctggtctcgaactcctgacttcgagtgatccacctgcctcagcctcccaaagtgctggaattacagatgtgaaccactgtgcccagcctaatgttctttttttttttttttttaatcatggaagtgaatacataggcacactcactcatctttgaaagtttatcaagctgtaccattatgatttttgaacctatgcatgttgactttaatgcaaggtttactttaaactattttgttatgttaaggaggaggcacctcaattcaccgggatacactttttcacaaaattaagcatgcacacacatacacaataccaactttttttttttttaaactgtgtttgctccatcacatattttgccttgagtcacactggagaagctgagatggcttagttaacacttccaggtgctgtgggcatgggcttggactcaggcggctgttatttttaagacatttgatatgattttaagagctggcaccctggcttcaggaagacctgagttctagtcctggctccacctcttattaatggtgttattttggttgagttctggaaatgtcagtttccatatctgtaaaatggggataatattaattctgactctggtagggtactgttgagtatcaaatgagataatcaatgaaagtgcttagtgcagtgtctggcacatcgagtatgcacaataaatgacaggtggtggtgatgacagctatgactactagataaggaggggatgtaaggctgtttaagacacctgtgggggttgagaataaagagttgcaaatacaggacggctgttcttgtttctgctttggtgcttagtctcctgtcatttcctttgggacccctctgcaccctcctcctctgctgttgtcccagttgggtcagtgagtcccagcagattgccttctgcctggctcatgtcctttctctctttctctctgcatgctgtgtgtgggtgtgctggagctagcctatttccctgctatcagcagaagacaaaattgttcgataagcactttgtcgtagtcagaccatcacaggagctttcatgaggaggcagggcacacaaaactctttgtaaacaataaaacccatctcctgctttgacatgaagttgcccgtaggttggtagtcttgctgattccatggtttcaaacaaaaccagaagctgcttccactggcagagcgtatttccatgtctcagagtctcatttctgtgcctctccccacctccctgtgggtatgaagttaactgaacattatctttctcctcttcttctgcctaagaacccatcacatgtggcccaagggagcagaggcatcagagcatgcttctttttatatggaattaataggtttatgtttctttagtggaatttctaagtcctagaggaatagaaggccttgctccctctgaactctgaggtcatttggtgtggtgatatgggagggcagatgtagcaggaatggggacagcaggatggatgaaactgtgctgaggttcaacttacctctgggaggtggtagcctgagattgtctgcggtccctggcatggaagattgagagagtagatggcagctcacgttctaggaaaagcaggggatgacttgtacaaatccgcaccgatatgtggcctaatgtgctacccttatcctcactgctccatcaatttttctttgagtcacttataaagagctcttccatttctccttccaggagggaatgtgattggccaaggaagggctctgttggtagacgttcacattttttaaaaaaagcttctatggcagtgaaagcagggtccatgcattctgtagtttttgcggattgaggggaaatttctcctctctctgggtatcagaaagaagggctgataacactagaaacctatcctccaactctggcagagggaggcttaggaaatgttgggatttagaagagcttcattctctttcctcttgggggaggcacaataaattcaaaagcacaaaggctctctgaacacggaggcggggtcctttcacgggctgcgaggctgaccggtgctgcagtgatacatcatccgcgcaggctcagagaatggcagtacttacaagggcctgcttcatgacctagcactggatgttgtattttttgtttgtttgttttgttgttgttgttttgagatgcagtctttctgtgtcaccgaggctggagtgcagtggcgcaatcttggctcagtgcaatctctgcctcccaggttcaagctgttctcctgcctcagcctcccgagtagctgggactgcaggcacgtggcaccatgcctggctaatttttgtatttttagtagagtcagggtttcaccatgttggctggactggtcttgacctcaagtgatcctcctgcctcggcctcccaaagtgctgggattataggtgtgagccactgtgcccagcctagatgttacagtttttaaagaacttgggcataggtactcaaaaaacaaaactccttttgtctggatgccagcactatttttgtcattgtaaaaattaatgagaatgtactccttataagttgactggcaacaggctaagagtcgttttgggattgaggaacaaataacacatagacaactatcatgctttttccaactgcatattgtccacctcttctgcctgattcaggttccctggacaccaatccctgcctggtcctgtcttaagtgcccctgagccctgcttatttcctagggagcattacctatgcttgacctcacctgtataagtctgtccacggggttatgctgtgccagacagaagttgcaaagggtagtgtgcaaagcatggaaataagggctttgccaaattagtgggtcattaccagtaaaatcagatgttgatgcatcatggaaaaaagtcaacataaaggggcttagaagccagattttagaaaaatgggcaaggactctcagtgtggaggtaagtggaatagaatgaggaatttatcaagacagagatggttcagctgggaactgagtttgcaaatgaattaatttgattcacagcattttatggataccaggccctggaaagatagtagctaaaccttgatatagctctgccctcatggcattaactttccggttcgatgtctgcccatgtcttcttttactttgaccctaacatgcctcatgggttgaacagaagtgctttaaagggaaggaacctctgcaagaggaagattactgcggatctgaaggagtgaagatttgatgtgccttttctcaggggttatcaaacaggtcagattactccacatccaggatgcccttttttattccagcattgattattcacagtgaggtctccatgggaagtattttattataggtcactgttctcccagttccttttgccattaccctcattccgcccagctacccactaaatgttacttattttgtcaaggaatacaaattaatgctacagtagcccaagccaattcaagccaatttgttgcagaaaagtccaccatccagaatatgtagaaaacatgctttgattagtcatcatttgggatcacacatccatccaggtcttctccattgtatgaatgaccaagctttggcaataaccacaattttttttttcatgcttaaaaaaatcaataggtcccatcagcacacataatcaccaccccactccagaggcagaaaattgagagttggttttatttaaaattgctatgtttgctttgtctttaaattgctatgtttcccacagatactatgtttgtgtttgagcatcagtgaggagacatgagtggtggaaggaacttttgcctatatgccatggggaaagagaaatagttttgaatgtagcttgagtctgggcagtcaggctttcagtttaaattggctgttcaagagaatgatagatgaactgaattattttttcccagtaagagagtgaaacactttaacagagaaggcattctcttaggggttcaaagtgtgtagtactaagaaaagaagttaaatgtaacttccctcttctacttcttaagaaatttcatgccctctttggaaccccttgtagcatttcataaatacattctatttttcttaagacaagataggttataaggagaatcttacagcagcagtctggcttagactaggtaggttttgcatctttgttcattgtggtcatttgagtagaaccaagtgcatgcttaagttagtgttccttttaagaaaacccactacataaacgttttgatatagaaaatatgtatgctttgagtttctgtgtgcataaaggaaggaaaggtggggaaaatggtgaatttatttccttagtgtattttactgttcagttgcagattattagccacttggcagatgactgagagaagggaaactttagattgcacattgaatatcaatttaaagtgaaatggtaatgagttaagagagtaataagatttgatttacaataagtttaatttgtaatcagttttggcttaagctgcataagtctacctgtaagttgtcaggtgaatcatgggcagcattgatctgagatgcagaggtagaagtcaggacaataagagataagatgaggttgtgcaaaaagaaacagcagcaagaagagcaaacaggcctcttctgagcttccccatctttatgcctctgctctcctcttaatcctttacttcactcaagatccttttcaaaatgttaccctcagaaataaagccatgtgtgatcactacccacaaccaatgagatactgcctattgcctgtttggacaaaaaatagctaattttaggtcagtaagtttgggggttagaaaggttggatgctagttcctgcaacattacttactattatatgatgtgaccgtataatctagggtatgttgcttaatctcaccggacttttctctgaaaattgtggttaataaaaagtcctaattcatagggtccatgggaaagttaaaggaagcattgcgtgtaaataagatttcttagtttacagcttggcacatagcaagtggaaggagtattagtatgattgcgattataattttaaggctgtttttatagatctggtttagttacaaaaatattttataagttggttttggagaaaatctactggaaaatttcatttgaatagaagggctagcacaagtggcttggggaaaagccacactttcacctgactcagacccggggaaattctgtcttaaaaaggaagggaggagtaggtttctagtctaatctcagaacttcagaatcagcatctctggagaatgtggccaagattttgaatgttcaacgaagattccggttgattcctatacacaagaacattgaaacacacaagcttatatacaaatggctgtttcctcagtactctctaactaagaggctggcctctaaatataaattatttcagcaaagtgattttattagcaggagcatatttaattgattgttgttttgaagtaaggctactttttgacctgcacatctacagaggaataattattcctatacagacccttttagacatctataggaggcactggcaatatttttaattttctggttatttttactatttatggataatttccttcttagtcttcactagtgcttcttaccatattttctatcttatatgttccctataagtttctagcacataacaggccctttaatgcatgttcttttggactgaattttttcttctctattagactgtaaatttcttgaggacagaaatcatcttgcttaatatccagttccagtcacaccttcaacactgccttgcttggtataagacttgattttttaaaatttatttttatttttttcttagggtcagtgtcttgctctgttgcccaggctggagtacagtggtgtgattatagctcactataacctctagctcctgggcccaagtgatccttaagaaaggatcagtagctgggactacaggcacatgccaccatgcccagtgaatttttattttttttgtttttgtttttgtttttagagatgagggtctcgctatgttgcccagcctggtctcaaactcctgacctcaagcagtcctctcacctcaacctcccaaactaccgggattacaggtgtgagccaccatggttaaatacaaaccaacctgttaggattacataacagtctgtatgtcagaggtagatcacaggtggcaagacaaagaggcccaatgcagtttcatgattattttgaaccctggagaaaactggcttttgatgtgaagtcttttatagagaagtcacatcccaggatattcttataattcagccattctccatctggctaatcttaaccataggaagggagttcaatagtgtccacttttgtgggcttagcaaattgtgctatgtatgtcatatacattatctcatttaacccttaccaaaaccagtgaacccaccaatagataccattatccccatttatgtctagtgatatgaaggggcttgccaaagtcactaagcaagttagcaccagcacggcaatttgaatcgttcccccgattccaaatctagtgtccgtctcctacaccagtggttttcaagtgtggttcttggaccagtagcattgacatcacctgagagcttattagaaatgcacatgctcaggctccttctagatttcctaaattggacactctttgtcggacccaaatctgtggttaagcacactctccaggtgattctggtgcacatgaatgtttgaaaaaaaaaaaaaaaaaaaaaaaaaaaaaaaatcacagcatgacaccagctgttcctaatagtccttccttaccctgagcccttgctactcaaagtctggtccacagaccagcagcattggcttaacttctaagcgtgttagaagtgtagaatctcacactcttctacatacctactgaatcagaatttgtattttagtaagatatttggtgattcatgagcatattaaagtttgaaacgcattactcgaaattatgtattttctctctgtagtcttatattggcttttcttagtctcagtgtccaagattcttggggtttttgttcacccatgtacaggaacaaatgaaagttcttccattttctgccttgtgaccaaattgagagctgtgcttactcttttctgataaaagtccacttttcctttctatatccctgctcctccagcctaaatgcatgcacacacagacaacaaatgtttttgtttccctttgatgtcaccttaagctaggcacaacagcaagggagtagctagagttgtgttaacatgttataaattaacaggaatgggaattgttgcccattaattaggaaagagatggctaatttcttgctattttctatttcagaaactatatgtagaacctgaaagcagcagctcattgctccacagttgatgctaattatttctcaaccatgttttgagcaaacaggtagtgtttagaaagcctaaaacataggctcttcagaggaaaagacacgcaccttctggggcttattgtgtagtgaagttacaataagaataattggaaaccccactctctgacagagcagtggggaatcaaagattattcagaggaggatagctaaccaaataatgtcccaattcctaaatgattagttctgcctcaatgccacatagttttcttctgcagtgtttaacttctcactgggtctaaggaactgacccatcatggtgaaggctctgctgaattacatattccattttgtatactgtgagtcttccacactctctgtggccatacccttgatggggggctaccaggcactggcagtttcctccattctgcaaggaactggaagcaagaaaaatgatgtccttgctgtaggtattctaaaacggtgatgctcaacctcatgtatatattagaataattggagtgcttgttaaaaggtagattcaggactttgctctcagagttagaaattcctatttaagatgtctaaggtaggatccaggaaaatgcaatgtttcacaagcacttcagacagtgctgatggcattttccaggtgccaccattggctaacaattataccattggtacctatgagattttagaaaggggactgcatttgttacatgtcctccactgtgtgttgggatagttgagaaagatgatcttagacttccctttctgctctgtaatagttttcccagagttggttaactattactgcatttagacgtatctattaacatctacaatgtaccagacattgtgctggatgccagagataaaaaagataaatcaggctaattactgttctcagagacatcatagtctgatgcagtcacagacatacagagcaataaatgacacaaaagcatattagctggtaaaatagcaacctaacataggacccagtggggactcagcattggaaacagtgacatggagtaaattcccagtgtgtgctaatagctgtctgtattgggcaaggccaggaaaattgggggactcttggtcacatgggaagttcaaggttgtcctaaaaagtttcagttgaatggaggaggcagatatgtatatatatatttgaccaactgactttccttcaactgatagggggtttggttacaaataagtaaaatttttaagaaaatttatgcatccaagagggaatctcaaaagggacactggagatctgtgtaatttctaggaagaaaattgtggtcctattattaaaagcttagaaaagatatggttcactccattgcctggagttttgaaggctctctgttccatttttcattatccaataataaatatcatagtgaaagccacctttagcacttaaatattgctgggattttatgggattgaattgaagggtattaaaaagccaggtgggtgagatacttttataacacatgcttcataaagctgtgtatagtaagtgcctgtataccaactttttaaatgagagcattcgggcatagcatttgagcatgagggggcctctgcttgttaattaaacttgttgataatactaattgttaagaaataggaagaagcagcttgtggcaagtagaataggatttgtttctgagaagagtagtccacttggaactgtcatgtacatcagcaggacccagcctgagctggaactgggcatcgcggaaaggaagcagacctgcaacaagtttcactagccagtagctggctatggggtcagtgtagctgttcacctggtggtggtggcccgtgctacctgtttagattgactgttattattattttccattaagcagagggatttcattaggagacttaacaagctaggtgggagttagttttgtacttactgctattttttacttaacattatcatcctagtttttctggataagtgagaaaggctgaaaccaatgagtcccggacccagttcttttatttatatagattttttgaagtgaaattcacataaaattaactaaaattcactattaactaaataactaaataattaactattaactaaaattaactatttttaaagtgaacaatttagtggcatttagtacatgcacaatgtggtgtaatcactactatctagttccagagcattttatcacccccaaaagaagccctgtgaccattaagtagtcgtttcccattcccctatatccctagtctctggcaatcacccgtcggcattttcttcctgcagatttccctattctggatatttcatataaatggagacatacaatatgtgaccttttgtttctgctgcttcttacctgccatagtgttttcgaagtttttttcatattgtagcatgtatcactacttcctttctttatatggctgaaaatattgagtgtttaccaaaatcagtttatccattcattcattaatgaacatttagattgtttccacatgttttggccacattttgtgaatagagctgctatgaacaggcatgcacatatatttgtttatctgtttttcattcctttgggtatatacttaggagttaaatttgtattatttgtacaaaatattccctgctactgggtgtctccctttgggaggattagatacctcaccctcaatgagaacaggcttggctccataacttactttggcccatgaatgcagtgagagtggagatgagtattgctgaatggaataagaacaatctcaaaattctgccttcactcctttccttcgtccaagactcctgcagggatgacctgggggcttcttctggctgggttcataaatgcaggcaccatggagcagagcagtccatcttttgagccctccctgaaagacaataaattgggctctgagaaggataaaaagaggagaaaaagttcttcttgccacaaaagagcttacagttttgctgtaacttaagcaggtaattttaaggtctacaaagtactacagagggctgaggaagaatccacagagctttcttagaggtggtggcatttggatatggccttgagggagtgataggatttacgggtatggagtgtaaaaaagagccttccaggacaaagaataactgcagcaatgacatcacaatggtaacgtgggatatttggggaactgtgatttaggtgattcctttcaggaatataagcactctggggacatggggctggaacattctattggaaccagtgagtgaactatgtgacctccagactaaagagttggctctctataatccgacattacaaatgacaagtttgtctcagtaatggattactgtcccactcttcctttctcgttcttcaggatgtcacatccttctgcaacagtgtttatcagcctttacattgttgtttttacttcatacatctcagctgtgcaacccaagggactcttgtccttacacaaactgattctctgtgtttgcgctcatctcatttgaaagtaactgttcggaaacaccatgggacatggaaggcaaagaaagccccaacatttgttgaacgtatatgtgacaagagttttccaaatgttatttctccttctcatcatctcctctcaacccaccatggtggtggtggtggaagtgattttttttttttaaattttacagttgagtagaactgaagccttgaagtcaaggagttaatagatgatggaggtggggtttgactgtgtctttctcatctgtgtgttccctgtttactgtagaatctagcccatagttagagcctcaataaatgaatgtgagggaatgattgaccacgtaactgaatgaccaaatgaaaaagcaaggtctgtttgattctaaacccaaaggtgatgagattccattaagaccaccgacttattctgtgtaattttgttacccccacagacaccaaaatgaataccctggagctatagtgagtgtggctgggatccgatgacacagctctggttgaagagtgtagggtgccctgaggggttcctagataatttggctctgctaagagaatattctcaattatctcttgtccaccttctctggacagaatgctgggtgcatggacattcattgggtgatccttctcaggtacatcattcaggacattttctggccctttgctttgggattagagtatttctaaaaccctagctcaaaatgggctgagtgcgggaagtgaagaaagcaaggtgaaatgtaatttcctctttaatatagactgtcatttaatctaatattatagaaaatgattcgatcttaaaaacctataaattacacttgacaactctctggtgttcctctgctttccctttcagcaattataaatggcaacagtgggctgtggcagaaaggagccttctgaatgcggtttgtttattggctcttaatgagaagcgattaatctaaatcaccataggggtggatcctttgtggagctttgaaatcagaagtggcagttggaccttttgacaaatgtgctgttctgtccttaataacaacaaaaagtttgcgagggtttgtgtggtattgttttctttctttctgcaataaggaaagaaaacacacacacacacacacacacacactcagacctgtcactgggacaaaatacaaaaccatcacatttgggctcctctgtttcttacctcttcagtccttcctctcctacctcttcccaccctctctggctgaggcagctggggctcctcattatgtagttatctggaagacccttttctctgtttattactgttattgtgtttttcttttccctgcctgtctggggaccacctggcatgggatgatggatcattacagagactacctgcctggcaaaattgctaccttggtcccctcctcttctgcgtcacgttgagaagggaagcaaaaccaaacaaccaaaacaccctaaaaaacccaaacgcctatgatcacaagctcttttgttttgagataatggggtcaaatttgcagccgaagggatgatcccataaaagtaggatgatggtgggtagagcaggatgagagaacacccacggagaagacctgttaggttaaaaaaagaaaaaaatctcatttttcctcctgctttctatttggttcttttctgcctttgtttgcactaattctttgtcattgccttgctgtgccctctgtctcctttgctatgtcaccaatacagagtacagcaagaagaataaaacactcaacttgggagggagagttctgaatttgaacctgtcttaatacttagtaatcaattgttactgagtagccaattgtcaataagtagctgcttgccactgagtagcaagtcactgagccctggcattacttttcctgtagaatgggtgtgataggcagaataaccacctccctgcaatgccccgctccccagaatttgtaaatatgttcagttatatggcaagagggaattaaagttctagattgaattaagaatgctaatcagctgatcttaaaataaggagagtaccctggattatcaggtcggccattgtaatctagagaatgggaaagagggaggaagaagaaccagagtgatgtggtatgacaaaggctggactagctgctgctggctttgaagatggaaggggccaggagccaaggaaagtgagcagcctttggaagctgcaaaaggcaaagaaaacagatcctcccaatattagtctgttttcacatggctataaaaaactaccagtaatttataaattactgagtaatttataaagcaaaaatgtttaactgactcacagttccacatggctgaggaggcttcagggaacttacaatgatggtggaaggtgaaggggaagcaaggcacatcttacatggtggcagaagagagagagagggaggaagtgccacacttttaaaaccatcagatcttgtgagaacgaactcactgtcacgagaacagcatgggagaaactgcctccatgatccaatcacctcccaccaggttcctccatgaacacgtggggattacaatttgagatgagatttggatggggcatggagacaaaccatatcactcccctagagcctccagaaaggaaaacagccctgcagacacctggattttagccagtgagactcattttgggcttctgacttgcagataggtaagataataaagttatattgtttaaatcaccaagtctgggatgatttgtaagagcagcaacaggaaattaatagaggggatactatggaactgaatgctattcacccctacacataccaaattcatataaatcgtaggattcatataaaattttaaccacccccagtgtgagggtatttggatgtcgggcattcaggaggtggttatgtcatgggaagagccctcatgaatggattagtatccttataaaagggacctcagagaactctctctcctcattacatcacatgaggacacagtgagaaagcactagttatgaacaaggaagcaggctctcatcagatgctgaatctgccagtgccttggtattggactttccagcctccagagctgtgagaaagaagtgatgggtatgcataagccacccagggtatgatattcttttataggagccccagtggactaaaacaggggtaacaatacctgcgttgcattcctcgcagggtagagcaaggatcaaggagacaagagctgtggaagaacttggcaagctgtaaaatgcaatgcaatccgaagactttggtaggaattaactctgcctgtgggtgaaggcatgcagcacaggtgtcttgagctgggggtaaaagcacagaccaaccaagtgctttgaacatctgccaactccttgcacagcctgactacttattgttttcatttttttctgggagctaaatgtctctcctctgggtgaacaggatcagtccctcttgtcctttcctcagtacagttcctgcatgggtgaacggactctaaggcaccattggttattacagcctggtctcttatgtggtccattgtctcaaagggttgttgcagcagcaagttgcccttgttctgcgttgatcacatctagcatttagatgtttgagggcccgtcccatcagttgagttctaaggaatgttcatgtgatacgatacttactgggcaatgcaatgttcccagatatactgatgttgttaccaatgctgatgaagctcttggctgtttaggctctttcagctagaccaggatataggatatttctaagtatatttactcccaagattgttttcctcacgataacttgaaggttatcttccttctcctaaatataataatcctccccagatatctaggtttaggttcctgttttagttcattatctgttgcttgtagcagaatacatgaaactgggctatttataagaaacaggattcatttctcatagttctggaagctgggaagtccaaggtcaagggggtacatctggtgagtgtcttcttgctggtggggaccctaagcagagtcccaaggtggcacagggtatcacatggcaagggggactgagcacaccaacatgctatgctcagatccctcttcctcttctgcgcccataataatccattaatccattaaccatttaatccatgaatccatgagtggatttgatacattagtaaggacagaaaacctttatgatccaatcacctcttaaaggctccacgtctcaaaactgccacgtagggtattaaatttcaacatgagttttggaggggacaaatatgtaaaccatagcaatcccttaaaatatcctaagtttgaggcttcctataggaagaatttaaggtccaatggaaaaaacagggttagcaggtgaacatatgaaaacctcccccttttttgatgttcactggaagaaatactaaagataatacaataaataataagtattagtgacaatctgcagttcttaaattagccataatggatgctgtgcaattaatttccatttaccatctcttgtgcacttgaattttttcaggcttttcctcctacgcagcttcaacaagatgcttataaattaggtttgttttgtggtagataataggcatgttggtgggcattttttgctttatcttttcatatagtcattgcctttgtgattttaggctttggaacagtgattcttaattctggggtcccactgtggtcccagatgtgcacagtagcaacttggatgcttgaagcaacaaacgccttggatgatcttgatttaactcgttagatatttctgaaaaccaaacacacctggttatgtatctatgcctgtgacaacattgtgccaactcacatgtcttcatcctatttaacctgcgccttagtccatctgatcgtagaaatccatgtctgggtttacatcttcctttaatgatcctaatgtggagaaaagaaacaaagaaaagccccaaatcaaaacatcaaaaataagcaaaatgacttcaagaccaatcctgtatcctgcatttttttgaattatgaaacttctttatacttctctcctggtgttagatttgctttttaaaattactggaaataaatatctggttaaaaaataatgtggccaccaatttgttaaatttgtctatatccaacttctacaaaagaataatatgaagtagcagaggaatactgacctgaatgccaattactgcatatgcaactggtaatgccttggctggcagagggacagtgcctcaggtaaaggttttgctgactgcccttattgagatgaagctagcttctctgtctagtagggcactgatgaaccccaaatacaatgaactgaatatttggtcaagcaaactgagaaacctttgagtgaccttcactcagtcatgcatcacatgatttattgatttattgagcacgttcttcaggcagtgcagcaaagaagaccagagaacattgtttaaccaaagctccctgcctttaaggaacataatatcaaggtggcaaagtgaggtaaatacaagtaaaacgtaaaataaccaatattttaaaatatattaatatatttataaatttcaaatatatttaaacataaaatcgcagttcaatgtgattatgaatttgctgatggagttcttggaagaccgagatcattcagctggagcactcaggaggcttcatggaagggattgagttaaaatgggacttgaaggaaggcagggaggatgctgggctttctaggtaggggagtggcatgggcaaagataggaatgttgcagtaagcacagtgatttgaaaaaactctgaggcacagcttggcttgagcaagtggttatgttgaagaggtcaagcctgaaaacagcatgggagcccactaaatgcctgagatgctgggtatgtttttaaagacatgtagagagtattggtgtttcttgtggaggggagattccatatcagagctgggctgggggaaatccattcagtgtatggtgtgtgggatagtttggggcagcagattcttactccataggggaggtcagtaacaccactccctgaattgggagatgctgtttttcctgtccacactgagtcttcttcactaccccaccctcatgacacacctgtcctgcaccacgagttgtgctcaccatgtggatagaaatttactagcttttcaaattttccaagagcaggcaatgcgtagcatgttttatcaagaaggtatatgtatgtgtatatgtgtgtgtgtagacagataatgttttatgattgtaaaggaaatgtgtgctcactgccgaaaatttggggaaaatagaaaagtatagagaagaaaataaaaaatactcataatcttgccacttaggaataaccactgttaacgtgaatgtttgtttcaagttatctactatggataagtacagacaagaaatataagcaatgtttaacaaaattgagatgatgcttcatgtgtgtccagcctgcatttcatgcactgtttaaatatatggttgtttttcatatgtcataaaagtatttgaattcattttaatggctgcataatattccattgaatggctttagctcactttagtcattatcctatcaaatatagtcattatttctaattttgtattattataaaaacattgcattgaacctacaggtgcataaaccttttattgggtttctgatggtttccttagatagtttgctagaagacaatttacagggttaaagttatgaatatttataagagtctcgttccatattgccacattggttttcagagtggtcatggcaatttatgcttgcatcaacattgacagtctgcctagctcactccactggctttgccatggtcaccaataccctccctgttgctacattcagtagccaattctcagtactctttatacctgaccatcagttgcatttgacacagctggacactcttccctaatatactttctttccttgattttaagagtatctcactctctgagttttccttctccctctcaggctcctttcctggtctgtccctatctttttgaccctaaacatactatagagctcagttctccagactctcttttatctgtatttgctgtcatggttatctccagattcatgtctttaagtgttattcagactctgatgtctcctagattcttatctgcaggccagccctctccccggagtataaaccttgtacattgctcttctacttaacgtctctgtttggatgtgtattaagcatttcaaaaccaaattctttatttttaaagccctgaacctgtttttctatccataagtgttaattccactttcccagttgttcaggccccaaatctatcagataatttgagttagttccaatttgtaattattagaaacattgagatgaatgtacagtttaaaaatcttttaaggggtcacctcactttctctgacactctacatctaatctgtaagcagacctttttaacttttcttccaaaaatacacccagaaactgaccacctctcagcacctcagtgctccagcttggtgcaggccattcatctgtcccttctgatcattacagaacctctccctggtctctttgatttttttccccacatcctccaatgctctattcgacatggtagccagagtgagaggattaaaaaacaagccctagactatcacagccatgctcattgtatgtgtatcatatgctttctatgtaacttgtgataaagccagagtccttatatcaatgcctgggtctgcgtttccttgctgacctcatttccaacactctacgttgttcattctgttccagcctactgggctcctacatccttttgcaaatgctactttcccaatgaggcctttcctgaccacatgatttaaaactacacagcttctctttcagcacctccccttaccttttctgctttctttcactctaaaggccttatcaccatctgatatgccacatgttttacttatttgtctatctgttgtttattcttccttcaacagaatgtaagctctatgagggaaagtattttcattctgatttgattactgctctgatctaggtccttagaatagagcctggcatggagtaaggcctcagtcaataggttggatgaataaatggtgtgtatgtgtttgtttgattaaagtgttcattagcctgttactttatctctagtctcgtgtcttatttttatatttattttttactttaaaaaattgtagggatatacaaataatatgcaatttgccgtcttcccatttttaagtgtacagtttagtagtgttaagtacacattgttttacgaccaatctccaaatttcttttcatcttgcaaaactaaaactctataccaactaaacaacaactcctcatttctctctccgcctagccttagtatctaccattctacattttgtcattatgattttgactaccttaagtaccccatataagtgcaatcatatagtatttttttctttatgactggcatatttcactttgcataatgtcttcaaggttcatccatgtagcatgtgtcagaatttccttccttcctaaggcggaataatattccattgtagtgtataccacattttgtttatccattcattcattgatagacacttgggttgctttcaccttttggctattgtaaataatgctgctatgagcactgggtgaacgtatctctctttgagaccttgctttcaattgcaagagtcttgtttcatgttgccacattgcattttagaatagtcacgccaatttatacttgcatcaacactgactgtctgcctgcttcactccactgtcttggccatggtcaccaataccctccacaatgctacattcaatggtcagttcttggtactcatctttcttgaccatcaattgcaattgacacagctggacactttcacttttgggtattacccagacgtggaatagctggatcatatgataattctatttttaattatttgttgaaccaccatactgttttctgtagtggctgcaccattttttgttcccaccaacagttcacaagggttccaacttttcacatccctgccaacacttgttattttctgattttttattttttatttttaaacagtagccatgggtgtgaggttgtatctcattgtggttttgatttgcatttctttaatgattagtgattttgaacatctttttatttgctcactggtcatttgtatagctctggagaaatgtctattcaagtcctttgcccattttttaaataggattgttttcttgttatttttgtactttaattttttttcttgaatagcctaaatgactgcagttttgttggtgtgcttatgttaaatcctgaggaacaagtgtaaataagcttaatataatggattagggtggaaaggtggggagtctaattttggcaaagagaatggcatgcattgtggccataggtgagacaggatatgtataagcatacatgcatattggtgttccgtgacatttatatgtagtttacatattttacttgtaataatcccaactgcagcatcattgacattttgtgctggataattctttgttgtgagtcactgtcctgtgttttgtcacatgttttacagcatccctcgcctctgcccactagataccggaactctctcccctgcccccagctgtgataattaacatatctccatatgtttcaaaatgtccccttggcatgaccccttctttctcctcagttgagaaccactgttcgaagaatgaatgctggtatattgtgagtaaaagccgtatctacagtaggctctgtttgtatggaagtcaatattcaacaacttatcaattatatcagtgggtttagcggatagctatgctgtcattgttttatactctaagagctcatattgatgttattgttatttcttattgaacactaactttgctaaaagtctaccattaggactcaattatacaataaattatagcctttctttttttatatttagagaaaagtctgtttgctcctattctgagaacgtgcccaaaacattgaactagagtgttttccttgactttctggatctctggcagagtgagagagagactgagaaacgtttagctttcacttgattttaatagactgcacaaaggaaatagaataggcaactgaataaagtgacatattcatcaatgatattgtaagactcactcagcagcaagaaagggtgcattgtggaaagatttctggggaggattttgacatctccaatactaatgttgactggtttagacatagataagctgacaggcttttgagagtataagctgactaagcatagcccctgcctgactcctgacttccctgagtgtcctttgcaatttgcaatataccattaaaattaaaaccaatattattcaacattctcaggaatttccttcagaaagcattacaagtttttttttttttttcaaaagatactgcaccatttgtatgttggtaatctctaaagattaccaactctaatcttggacacagacaattcatttacagtgaatggctaaatcacaggaacttgattgtatgcagttctcaccctaaggcagtggcatgtttagtttcctcatggggtatagtcatccaatgaagagatgagagtgttcattcaaagcagcaattgtgtttagcaaattgacaattatctaccaattggtgtttactctggccgtattcatgttggttaatagggtgtgttttcttaaaatattaccagaaatgcaaaatgcatgtaaagtgaatgtaatatataaaacactaaaatatgatgtttttctccctgacactttcctgtgttttaaattatggcaaacaaacacacgtacagacaacatgagatttaccctcttaacccacttccacatgtacaatagagtgttaactatatgcacattgtacagcatatctctagaattatttcatcttgtgtgactgaaattttataaccattgaacagcaactcctcagtcccctttatgcccacctcttgcaattttctccacaaagttcaggaataatgggagtcaagagggaggcaaataatccccacatcacctctatttgtctccaacctgcttggcatcacttctgacttcagttgtgctcttatcctagataatttattttttggttggggggatggggtctggctctgttgcccaggctggagtgtagtggtgtgatctccactgcccgggctcaagccatcctcccacctcagcctcctgagtagctggggccataagtgcacgccaccacaccagactaattttttttttttttgatagagttgaggtttcaccaaattgcctaggctggttctgaactcctgagctcaaacaatctgcccacctcaggctcccaaaatgctgggattactagtgtgagccaccatacctggccttatcctgggtaatttaaagctaaaggttaacatttatttagtacttatgtgcctggtagtgtgctaagcccctttaatcattatctcatttaatcctttcaatagtactaagaggtaggtacaattactatctccttttttctctagatgagataacagacttgggataattgcgacggagtttcactcttgttgcccaagctggagtgtaatggtgcaatctcggctcactgcaacctctgcctcccaggttcaagcaattctcctgtctcagcctcctgaatagctgggattacaggcacatgccaccacacccggctaatttttgtatttttagtagagacagggtttcatcatattggtcaggctggtctcgaactcctgacctcaggtgatctacccgcctgggcctcccaaagtactggggttacaggcatgagccaccgcgcccggccttgagcaactttctgtttacacatgaaatatcagtctgaggagcctggcctaaagacatctgcattgagagcctataaccttaacaatctgcgaaaccatatttgaaaaacccctcttccccttccagcacacgtatacccactgcagttctcatgtcaggacaaactgctttataaagaatcaaagcagaatgatgaacaaaacaaaattaaaatctctagtgggatctctgtcctgttcgtattgccaaaatcacataaatgcagaactcatgatatctaaacagccattgccacaaattatacactagatacctataattatacattgaaaggtaagcttgtgaatgtctttgtttttgtagaaacatgctatcacagctttagcgagagtcacatgtctcatccataaattcagtccacagatatatttaatttgggcacaatgttttttaaaaacccaattttaaatattttgagggaatgatgtgtactttccgatttgacacagtcctcaccagtccctgtcttggcttgtctgcttcacttgctcactttacctgctttgccctcacaggcattgggatttgaaatccatgtgtaacaagaaaaatttgggtggacatgggatgattttctttatagatttggtacgtgaatatacaatacacgtattttaccttgaggcttaacttctgacaaaatatttgctctctgattatataaataatatggcctcctccttttttatttttgagcacctacaactaacctatatcttcctcttagattcctactctcttaatgcttgatgctcctgtggtcagaaattgagatgagtgaagctgcattttgggcgggtttctcagagatgctttcaaaaaggattgtgtgtgtgtgtgtgtgtgtgtgtgtgtgtgtgtgtgcgcgcgcgcgtacagagcatggaaggtgtgggttttgaggcaattagaggagtaataggcaagttgcttttctcctgagcctcagtttccttatctgtaaaatataactcatgatacctatatcacatgatttgtatgagattttaataaaaaatcaggtaaaatgcccagcataggttagaaatccagaatatgtcagtatctatctcccttcctttcattcttctcaaaaagttgaattgaatagagacactaccagtgatatcaaagtatatcaaataatttctgatgagaatgtcagagaaaggtagtaataaaaatgtactctcaccaacaaaagctccataaaactgccactcaatgtcaatatgctttattatatataaatttctttatgtgtgtgtgcacataaatgcagcatctctgtatatgttagtgtatgtgtgctcacacgtatgtgttgtgtgtggattaatgtgcatttgggtatgcaagtgggcttgtgtgtgtctctgtgcatgtgtgcacagaaagaaacagagctaggggaagaaaatacattgcacaagatattcaatggtaacccttatttagtatattgtaactcacggtatataaaataaagttcatttatggtgttggtcttatcttctaattaaaatcatgggcatgaagcttttttatacctgcataaaataagcagtttaatttttctgcaccaggggaaaaatgacttcattgcctgttctgtagaccattggtacatgatatggagcaagtgaggctggttatgaaagcttttttttctttttttgttttgagacagagtctcactctgcctgccacccaggctggagtgcagtggcgtgatcttggctcactgcaacctccacctctagggttcaagtgattctcatgcctcagcctcctgagtagcggggattacaggtgtgtacctccacgcccagctaatttttgtatttttggtagagatggggtttcacaatgttggccaagctggtcttgaactcctgacctgaagtgattcacccgcctcggcctcccaaagagctgggattacaggcataagccaaaaagcctccttcttacccattatattcgtcctttcaaactctgcgagcaccacagatgcttcctcaggttttctcaagggcagcttgagtgctttgacccgtttcccctacccctaccccttcatagtgccatgggaagaggaagttatttggtctatgattactctaagagtatttccctgcattattcacacatgagtgaaaaaaagtcattatactgctccatttcttaaaaatttgctgataactagtgatgacttatttcaatgaagccaaagcaaatatttgagaaaagaaagtaagcttgtcttagaagctgtaaaggaataaaagagggaaaggactgtgaattttagcacttaaaagacctaaatttgttttaaagcttattttataatactaatatatgctctgggtaacattgaaaaaatcctgctagttaacacttttattttataaggtatggaaatttagggggctatattttatactctgggccttatggtttagactgcatgatagaaaattggtggcaacatatgcaaagataagaaaaactctaagaggaaataaattcacttgcttatttaggaactcagagaagttgagttgagctggataataaattccaaaaaagttgtgcttctgacgaagccagagacataaacaggggtgcagcttttgctaagatgttttaaggattttggaatataggaacgttgattatgccatggaatggttttaagtgagagaatgtcagaatcagatttatattacaggttgattgttctggccacggtgtgaaacatggattggaagggacaaggctaacatggtaagactggctagagttgtcttacagtaatccaggagagagatttgcatgttttggactaagacaatcgcaataggtagggagataatggattttgtgttaagagttaattgaaaagtaaaatacactgtcctcacggacttattctttcagaaggtgagaaagcagagtcaaggatgcatcttgggctttttgctaaacatggatgttggtggaaacgctcatggagctagggtataccagagaagcagtagggctggaatcaggtaccactgtggggcatctggagctcaaggtgcttgtggggcatctaaatagaagcatcttccaggcagctcagcttccaaatctgtgactgagactcagagatttaggagttttcccaaggcggtgatgattttcaaaaggaaaaggaaaagaatcaggaatggaagatgtcactgagtaatagtatattgagtgcaaaagaagaaagtcaaaatggagggttaaggagtggtcacagttaagggataataagagaaaattgagtatccaaatgaaatgaaatgaaaaggaaaaatagatgaacatggtgttatggaagcccctggaagagaatgtttcaaaatagacggaattgttgtggtatcaaaggctgctatgagtttaaataatggaaaagtctgagtgtctaagcgtttattggtttaaatactaaaaagtttgtctatctttagagagatcaatgtaattgtggcactaggggcagaagtcagattgcactggctggaggggcagtttactagtaataatagctatgactgttaagaatgtacattatgttgggaagtggaggcaggcagatcacttgaggccaggagttcgagaccagcctggccaacgtggcaaaaccccatctctactaaaaaacaacaaaaaaagaacatacattatgccctgtgctcaaagccagtttggatattatcagagtcaggttattattgaggaagctgaggttaggtaactttctcaagatgatacaatattaacagagaactgttgagatttgaacctggtctctctgatgccaaagacttttcattacaatatttctgtccacttgactggaagatgataaaccttctgtgggagaaatatttgctcaaggacctttggggctatatgttttggaaaatatctctaacaaaggaatcataaaaccacttaattaaatgcataaaacaattcagaaagaacaaaacaaacaatgggatcatggcagcatggcagtgggggagggagcttctcacaactaaagaacaatataggaaaaatgctgtgattaacagtggcatggagaatgggatgggggagagagagagaaagagagagagagagagacagagagagagagatgactgtcccaaggacaggagacagaagaccacaaaaaatgttcccggaacttccaacactatgttgaataggagtgttgagagagggcatccctgtcttgtgccagttttcaaagggaatgcttccagtttttgcccattcagtatgatattggctgtgggtttgtcatagatagctcttattattttgagatatgtcccatcaatacctaatttcttgagagtttttagcatgaagggttgttgaattttgtcaaaggccttttctgcatctattgagataatcatgtggtttttgtctttggttctgtttatatgctggattatatttattgatttgcgtatattgaaccagccttgcattccagggatgaagcccacttgatcatggtggataagctttttgatgtgctgctggattcgttttgccagtattttattgaggatttttgcatcaatgttcatcaaggatattggtctaaaattctcttttttggttgtgtctctgcccagctttggtatgaggatgatgctggcctcataaaatgagttagggaggattccctctttttctattgattggaatagtttcagaaggaatggtaccagttcctccttgtacctctggtagaattcggctgtgaatccatctggtcctggactctttttggttggtaagctattgattattgccacaatttcagctcctgttattggtctattcagagagtcaacttcttcctggtttagtcttgggagggtgtatgtgttgaggaatttatccatttcttctagattttctagtttatttctgtagaggtgtttgtagtattctctgatggtagtttgtatttctgtgggatcggtggtgatatcccctttatcattttttattgcgtctatttgattcttctctctttttttctttattagtcttgctagcggtctatcaattttgttgatcctttcaaaaaaacagctcctggattcattaattttttgaagggtttttcctgtctctgtttccttcagttctgctctgattttagttatttcttgccttctgctagcttttgaatatgtttgctcttgcttttctagttcttttaattgtgatgttagggtgtcaattttggatctttcctgctttctcttgtgggcatttagtgctataaatttccctctacacactgctttgaatgcgtcccagagattctggtatgttgtgtctttgttctcgttggtttcaaggaacatctttatttctgccttcatttcattacgtacccagtagtcattcaggagcaggttgttcagtttccatgtagttgagcggttttgagtgagattcttaatcctgagttctagtttgattgcactgtggtctgagagacagtttgttataatttctgttcttttacatttgccgaggagtgttttacttcccactatgtggtcaattttggaataggtgtggtgtggtgctgaaaagaatgtatattttttgatttggggtggagagttctgtagatgtctattaggtctgcttggtgcagagctgagttcaattcctgggtatacttgttaattttctgtctcattgatctgtctaatgttgacagtggggtgttaaagtctcccattattattgtgtgggagtctaagtctctttgtaggtcactcaggacttgctttatgaacctgggtgctcctgtattgggtgcatgtatatttaggatagttagctcttcttgtttaattgatccctttaccattatgtaatggccttctttgtatcttttgatctttgttgttttgaagtctgttttatcagagactaggattgcaacccctgcctttttttgttttccgtttgcttggtagatcttcctccatccttttattttgagcctacgtgtgtctctacacgtgagatgggtttcttgaatacagcatactgatgggtcttgactctttatccaatttgccagtctgtgtcttttaattggagcatttagtccatttacatttaaagttaatattgtgatgtgtgaatttgatcctgtcattatgatgttagctggctattttgcttgttagttgatgcagtttcttcctagccttgatgatctttacaatttggcctgattttgcagtggctggtaccggttgttcctttccatgtttagtgcttccttcaggagctcttttagggcagtcctggtggtgacaaaatctctcagcatttgcttgtctgtaaagtattttatttctccttcacttatgaagcttagtttggctggatatgaaaatctgggttgaaaattcttttctttaagaatgtcaaatattggcccccactctcttctgacttgtagagtttctgccgagagatcccctgttaggagaaggaaataaagggtattcaattaggaaaagaggaagtcaaattgtccttgtttgcagatgacatgattgtatatctagaaaaccccattgtctcagcccaaaatctccttaagctgataagcaacttcagcaaagtctcaggatacaaaatcaatgtacagaaatcacaagcattcttatacaccaataacagacaagcagagagccaaatcatgagtgaactcccattcacaattgcttcaaagagaataaaatacctaggaatccaacttacaagggatgtgaaggacctcttcaaggagaactacaaaccactgctcaatgaaataaaagaggatacaaagaaatggaagaacattccatgctcatgggtaggaagaatcagtatcatgaaaatggccatactgcccaaggtaatttatagagtcaatgccatccccatcaagctgccaatgactttcttcacagaattggaaaaaactattttaaagttcatatggagccaaaaaagagcccgcatcgccaagtcaatcctaagccaaaagaacaaagctggaggcatcacgttacctgacttcaaactatactacaaggctacagtaaccaaaacaacatggtactggtaccaaaacagagatatagatcaatggaacagaacagagccctcagaaataaagccacatatctacaactatctgatttttgacaaacctgagaaaaaccagcaatggggaaaggattccctatttaataaatggtgccgggaaaaccggctagccatatgtagaaagctgaaactggataccttccttacaccttatacaaaaattaattcaagatggattaaagacttaaacattagacctaaaaccataaaaaccctagaagaaaacctaggcattaccatttaggacataggcatgggcaaggacttcatgtctaaaacaccaaaagcaatggaacaaaagccaaaattgacaaatgggatctaattaaactaaagagcttctgcacagtgaaagaaactaccatcagagtgaacaggcaacccacacaatgggagaaaattttcgcatcctactcatctgacaaagggctaatatccagaatctacaatgaactcaaacaaatttacaagaaaaaagcaaacaaccccatcaaaaagtgggcaaaggacatgaatagacacttctcaaaaggagacatttatgcagccaaaaaacacatgaaaaaatgctcaccatcactggccatcagagaaatgcaaatcaaaaccacaatgagataccatctcacaccagttagaatggcaatcattaaaaagtcaggaagcaacaggtgctggagaggatgtggagaaataggaacacttttacactgttggggggactgtaaactagttcaaccattgtggaagtcagtgtggcgattcctcagggatctagaactagaaataccatttgacccagccatcccattactgggtatatacccaaaggactataaatcatgctgctataaagacacatgcacacatatgtttattgcagcactattcacaatagcaaagacttggaaccaacccaaatgtccaacaatgatagactggattaagaaatgtggcacatatacaccatggaatactatgcagccagaaaaatgatgagttcatgtcctttgtagggacatggatgaaattggaaatcatcattctcagtgaactattgcaagaacaaaaaaccaaacaccgcatattctcactcataggtgggaattgaacaatgagatcgcatggacacaggaaggggaacatcacactctggggactgttgtggggtgggggaaggtgggagggatagcattaggagatatatctaatgctaaatgacgagttaatgggtgcagcacaccagcatggcacatgtatatatatgtaactaacctgcacattgtgcacatataccctaaaacttgaagtataataataaaaaaaaaaaagttcccggtgcttaaaagatggacatcaaaaatgaaaccttcttctatatgcttctagccttgccccctatttttacctcaattcgacaatgagagactaaatcaggagaaaagttaatacaagtattttttacagaggcccagatgctcctttatgtgctatggtgtacaaatacagatgacttatttatgattaaagttattatatttattatttcctactaactctgtctgtatatgtccctctatcctttctttagattatgcttctcagtgatcctgagatggagagcagcatattgatcagctcagacgaaggggcgacctatcagaagtatcggctcaccttctatatccagagcctgctctttcatcccaagcaagaggactgggtgctggcctacagtttggatcaaaaggtgaataaatactattttcatttacttcttgtcatccaggtaccaccatgtgaaaatcacttgcttgcttaatccacattttggagggaattcagtgacatttcatcattccaacccaaatcatttcatcattgattttgtctgcagcaactaactttcctttctgctcttaagtatcaaaatatgtagacaggtatatttcacttattgacaatgctattatttccttttcttttcttttttttttttttttttttgacacagagtctcgctctttcaccaggctggagtgcagtggcgcgatcttggctcactgtaacctctgcctcctgggttcaagcgattctcctgcctcagcctcctgagtggctcggattacaggtgcccaccgccatgcccagctaatttttgtatttttagtagagacggggtttcaccaagttggccaggatggtctcgatctcttaacctcgtgatccgcccgcctcggcctcccaaagtgctgggattacaggcgtgagtcaccgtatttcacatttttaaaatgactttctttataattttactcatttgaccttattcaaaacaaccctgtgaaagaagtaggacatacataatattttatagtgacatagtaaacgaaagtacagaaaagctatggcttattcaaaccctccaagctagaagctaggagccagggcttaagtacatgttatcagattccacctcgaggcatattccatcacactatgccaccttgatttggtgacattggaatataccattgctcttagttgagttatagaagggaagcttcaaacaaagtccattttgttattttctaaaaatacattaaagatctagtgaccccaataagacctccttcttgagctccaaatacgtatattcagctgcatacatagcattgtctgtctcttgtatgcctcaaaacctctcaactcaatgtattctagaaatgaactggagatctcgccccagcatagctggctctcttccagtattccctatctctagccatttaattgcaaaattagaaacctagggagtatctttaatatttccttgttctaaacccaccatctgtgatcaatcatgggatctaatacctttttattccatccacttctttctgttaccacttctaaatatcttttgattccatcctcttctttctgttaccaccactactcaaatataagttttgtttgtcatctgaacgattgctagagtctcttccagtatgttaatactacaacctgaaaaaatatttcccaaatataatgattgtgtgcctttgcttaaacccttctcacatttcctctttgttcacaaactaaagaccacagtccccagtagatattaccagcccctgcctgatctggtccctccttctctctcctggttcactgttatcacttccccttgaatctttcagttgcttgccctacctctgccccttgctcccttccctgtgcctggaattctcttctttaatgtaagtctcatcatcgtcagatctcagatccagcatcacttcctcaggacaccttccgtaaactccctgatgaaatcaaatcccttttgatgttctttttcgtagcactatgtatccctcattcagaacacttgtcacaaatgagattttgtgttgatttttggggtcatctgcattcctcactagattacaagctctatcttgtaatcagtcctcagtgtctatccgttagatgaatgaattagtggatgaatgcttaaattctgtagttctctatatttgatcaacttatacttaagaaaagacattttagatgatttcctctttgtatttcctgacatctccagaatcgtactacagtgcttgatgccaaactattatgtaataatgttgtggaatcaatcagtgaaaggaaacagataattctgagcactgtcttacatagagatatccacagaacaaccttggttgaaatagcttcttcactctgctctcttaaatactgaaacagttgctcctcagtgtatatttgaatatgtgattgtgaatttgtgtttgtgtgtgtgtgtgtgtgcatgcgatcatgtgatgtcagcacctttaaacaataatttcaacataacctttctatgtctcgttaaccaagcctcatggtgggtgccaggtgcttaatgccatcccctaaggacacccacatgacatttgcagaggaaaagccactgcaaatatatttctttcatggcatcaagtggatattgtatgaaagacttagccaaatgtcagatagtctgtgactttagaggcttagtatagccagaaattttgaaacagtattgaaaaaagtaaattattcagatgtcattaaatggttggatggtaatttatttataagaagctcagacctcttaaagcttatttttatttctatagaggcaagctgggttagaggcaacagactactcataccaagaggttgataaaccaaatgcaatatgtctcctgtgtatctaagagtatcctttgcctccatctccacagcactgagaacatctggggcattgctcatgaagtacccttatggatataatgcattcaaaatactttcagacttggtggctgctctttcacttgctaaaaatatttgaaaatgtggcagtgggtgttgatggatttttctaatcacactgcacatttctagatatattattccttaggtactctttcttgttgacatcttttgcgtaaagtggctgaatgttcttcaggcccataaagtttctaaccagtgcttggccgttcttcttttaaataaatgatgtgtgaaagcagatgatgcccctggcaacacttgcagagatggcataaaacacctagccccagtcatccaggttgcagaagagtttttctttattttgggggtaatttagtagtttagagtcaaggagagtgatgctgtgcagcagcaaatgaaaatgcaagtgtagttgagattgatatacaaatgtgttatttcagactagagccttctctgatgtgcatgcatgaaggcagctgtttccttctagagaaaatgaaaagtgctagtattaaggtaactgcagcatcaaagggagatgtttgtggtgaggagtgaatcgatgtttccattattgtgcctttgatgaaatgcactagaaatttctttagagttggtaaggctatctcgttatgttgtatgtattacaaaagacctaattgaatgatattttaaaaggacagtatccaattgctttactttcccaaatgctaccccaaagctacagaagacttgccagtagatctcactcagtaaaggcactgctggagaattaaagaaataccttgtggataaaacaaaattgcatctagaaatcgagagatgcacatcacactctgctagtgatatgtggctgttgggttgtgagttaactgggaaacatgtctacctgataccggccaaggcctgggtgtggggaagatcttctgagtcctccaaagctgcaaaggggtggggggcagatgtaccttccatttgaccttgctggagggtcatacctctgcaatcctgatgcaccccagtctactaaagtcctttctgatttctggtcagcttaatttgggcatttgatcaattccttctcttctgaccatcttatgagcttccccactccttctacctcccatgccagctccttctctggcctatagattctcctgccatcttgcattttaatttaaaaggactcagtaaagacaagagattcattcttgggtatctttgtagatattttataagaattcctgaagtttaaaaaagcagtggaagtaataggttatggttgaccaaattggaaatgacaaaagaaaagctactctcctccctccatcttagaacaaaagctctataacttcttttgagggctgtgtctttgtcagttatttaagtggtaggattctcttttgtttccatcaggctatttcctcactgatgactgaaacagcttacactgtgatgtgtttagattagctggagggctcaataatcttattaaaactgagacttttggaaagattttgagataggttttgaagacagtgcaatcctagaaatatagctgctgttctcattgctgtacagagctgaatgtttaaacattcctcattttgacaagagactgcagtttttaaaaaaatgggcacatgctcatgtattcacagatgcatacatcctggcacagggggccttccgtaggagatggagagctgaaaatagctattttttttctgcgtgagaggtaggattgcaaagctctctaataccgtttatattcttggcaaaatgaaactttaacagatacagctgggtttggagatcagagatgagctcaatgggattgcagactccattgttttcagacacttctgggccacagtggtctagaattgcccataattttgatgtaaaaagcactttctgaaatgctagcacacataatgaagggttgctgttatagtattaatagttggggagtgggcatgcagctaaggatttttgttgatcacctcctatccgacaagatcaatagtagctgacggattgacagactggttaagcagctgatgcagtgttaggcgtggtagctggcaacacaggacccagtacagaggaggtgcttgtcccacgcaggctttgccaattggactgtaactggggcaggtgctggagtgtatctggatttcagagggcctaaaaattcaaaaggaaatgtaaacttgacttctggaatgctggatccaaagaaactgtgactttcatttatattctcatttaaaaccctcagattaaaaatgtaattttgttgagatcctccaggattagtaggcgatgataagtttctcagtagctattggcagaaacaggcttcctgtctcctcacctggtggagataaagcttctggggattaactagggatgaccatggctttgaagcttttcctctgaggaatatgagtgggactgaagggcacttttcacttaaagaaaaacattgcatttttattaggtccttttccattcttataaaaatgatttatatataatttaagagaaatatctctagctctgctcacctacagcaagtggccactgctcttacaggtgtctcattagtacaatggaggtgtgctatcttcatcaccatagaaacaccaggaggtagagcaaccacctaatgggtgtggcccataatcagagataccctgtgatatttgaatgttaccactgatctatttgagcagagttctgaatgacagaactggtttaatgttagctatgaacttgtattcagtgagagaagggcagtaaggatctccattcatgtcagtgttgttttcaagaacattcattcgaatgaacaacctttagcaaaatgtggctctggtggcctgtgtcaccccaagcatgctttttcttttcttttttaattttttgaaatggagtcttgctctgttacccatgctggagtaaagtgatgcaatattggttcactgcaacctccatctcctcgattcaagcgattcttgggttcaagcctcctgagtagctgggattacaggcacctgccaccagacccggctaatttttatatttttatgtagagatgaggttttgccatgttagtcaggctggtctcaagctcttgacctcaggtgatctgccctcctcggcctcccaaaatatttgaatttacaggtgtgaaccatgcaccgcacccagccccaagcatgctttttctatatgatgtcctagactttctggtctcttcttcaccttcttggtgtccattttagtaacctgatacatttattagagggaaaatcacatttgctgaaatggaagatacggcatgtatatgctttaagaagggtactcaggcaggcaacagtacctttcccaaagcaattatgttcccatgatagaaattcagccatggcagtgttttagttaagataggtggctccagccacaggtgctccaggaggtagagcaatgcagcctcaggtttccctgtgtactttcatctgctgcctctatgagctgaccttgtctttatgtacgtgctgtttttttctgttaataacactgccctagtgctgactactttgcttgaatccagatcctagatttctcgttttccagttggactcaggaattcttctgcttgtcccttcctttgcaagtccctatgaccttaagctcttgtctgcccgaccaggccaggccacttatgctccctccattctctgcctatatcttgaccactcactgtggtatgaaggcacctggccttttaaactcagggtcattctttcaattttaaaaatgggattttaacatacataccgaaaagcatacatctcatgagtctgatgaattttcattaactgaatacactcatgaaaccagcaacctgatcaagaaacaccactggcatctgagaattacttgcgtgctttttcagccactaccttccaccctcagtggagccactctccgtcaaggtcattttttatttcatgcagacaaactaggaaagcaacagatagaaaataagttttctcaaaagaaatgttagaaggtagcaagggaggtaaacaatagagaagaagaaatactttaaatgttaatattagagaactagactaaaccaaatacaagaatttattgacattcagtaatcccagttaatcaagaaaattcataaggacaatttgaaaaaattttcatttaaaattaacaggtttcagtttttaaaatgtatcactttctgtacgataattataatacccagtgtcgggtattatattttgaaatagtattgatgggtgtgcaaatgaattttccttcctggaaaatatcttggcaatatatatcagaaaacatacacatattcataactttaacccaatggttcagttcagaagctctaggcataacaatgcttatcaaagtcatttataatgggaaaaactaggaagaaacttactgcctaacattaagggactttaaattatggtatatacatttactggggtattatgcaaccattaaaatagtgaccataatatccatgtagcgacataggtatatattaatacctattaaatacatacaggcgtatcttggagatattgtgggttcagttccaggccactaaaatgaagcaaatatcacaatatagcaagtcatgtgaactttttggtttccccatgcgtataaaagttatttttatgctatactgtagtctattaagtgtataattgcattacgtctaaaaaatgtacatatctcaacttaaaaataccttattgctaaaaaatgctaatgatcatctgagccttaagcaaattataatctttttgctgctggaggatcttaccttgttatagatgactcctaagggtggtggttgctgaagactggggtggctgtggtgatttcttaaaatgaggtaacagtgaagtttgctgcactgacaactcttcgtttcaggaaagatttttctgtaacatgcaatgctgtttgacagttttttacccacagtataacttctttcaaaattggagtcaatcctctccagccctgcaaccctgataaatcttgctttatcaactacgtttatggaatatttaaaattctttcttgtcatttcaacaatgtttacagcatctttactaagagtagattccatctcaagaaaccactttcttggctcatctgtaagtagcaactccttatctgttcaagttttatcatgatattgcagcaatttagtcacttcttcaggctccacttataattctactattcttgctatttctactgtgtctgcagttacttcccccactgaagtcttgaacctctcaaagtcatccatgagagttggaatcaacttctttcaagctcctgttcatgttgatattttgatctcctcccatgaatgttcttaaaggcatctagaatgatgaatgctttccaggaggttttcaatttactttgcccagatccatcagagaaatcactgtctatggcagctatagtcttatgaaatgtatttcttaaaataataagacttgaaagttgaaatttctatttgatccacggtctgcacagtggatattgtgttaacagtcatgaaaataacaatctatttgtaaatctccatcagagctcttgagtgaccaggtgcattgttaataagcagtaatagtttgggaggaatctttttttcttagtagtaggtctcaacagtgggcttaaaatattcagtaaactatacttaaacagatgtgctgtcatgcaggctttgctggtccatttatagagcacaggcagaggagatttagcataatttttaagggccctaggatttttcaaatcataagtgagcattgacttcaacttaaagtcgtcagcagcgttagcctgggtgagtcttccgtcctttgaagctttgaagccaggcattgacttctcctctctagctgtgaaagtcctagatgacactgtcttccaatagaaggctgctcattgaaaatcttgttttgtgtatccgccatcatccatgatcttagctagatcttctggataacttgctgcaacttctccatcagcacttgctgctttacctttcacttgtatgttatggagatggcttatttccttcaacctcatgaaccagcttctgctacttcaaacttttcttctgtagcttcttcacctctctcagccttcatagaattgaagagagggctttgttccagattaggctttagcttaatggaatgttgtgggtgatttgatcttgtatctagaccactaaaactttctttatatcagcaataaggctgtttaattttcttatcatttgtgtgttcactggagtaggacttgtaatttccttcaaaaacttttcctttgcattcacaatgtggctgtttggcgcaagagacttcactctcagcctcctggctttcaacgtgccttccttactgagcttaatcatccctagcttttgatttaaagtgagaaacatgcaactctttcacatgaacacttagaagccattgtagggctataaattggcctgatttgaatgttgttatgtcttagggaataggggtgcctgaagacagggagagagataggagaattgtcagtagatggagcattaggacacacatatttatggattaagtgaaccattttctacaggtgtaatttgtggtgcacctatacaaaacaattacaatgataacatcaaagaacactgatcacagatcatcataacagatataataataatgaaaaagtttgcaatgttgtgagaattccaaaaatatggtgtagaaacacaaagtaggcacatactcttggaaaaatggtgctgatagacttgcttgatgtagttgccacaaactttaaatttgtaaaaaccccaatatctgtgaagcacaatgaaatgatgtatgcctgtacgcattacatattacatatataaatatatacaactgcgtacataatatatattaagacatacttttaaatacaagtatgcaaaaaataaggtaaggtaaagaaaggaaggaatgaaggacggaacgaaagaaggaaggaatgaatgtaggaagggagaaaaaaggaatgagggagaaaaattattttaaagaatggaaggaaatattcccaaatactagctaggtccgttaagatgatggaactatgtttgtggggcttttttttgcataccatttcttttccaaattttttattatttcattacattgctttcataattaaaaattctttaagtaatataccatgactagtttatgtttatcctagttataaggcagtgctcttaaaaaatgctttagatgtgaatggggctgatttagtaaaaccctttcaaatcattatttaatcccttttcaagaaggagtatgttgtagaagaaaatttccctgaactaaaatatgcagcctgagatttctcttttcttcagcgtttttttcactgtcgtccttttagaactctgaaattctaggaatatttttttttctcctaacaaaaagtgtactcttgttggatgtaacctcaatctatattatttacaactcagcaacaaatgtagggtttattattcagaacgcacccaccataggtagatgttaaggaagtgatttattctggtagtttttcagatgaattttccggctccatcccaaaattgaattagtatttgcttatttgctttgacagctgtaatggaaataaatgattctggagccaaggggtgtagacaattctaatgcattgagctttgagcctaggaactcttacatgccccatgttactttactcagagttggacgtatagctgctccttggaaatagagatacatgtcctgaagtaccaccttcccatgtgtggcactgacaaattctctcatatatgtgattatgttgaattttcataagcagctgccaggtagatattatttccaagatacagaggagcatatgactcttgaagggcattctaacttgttcaaggtcacacagccagtgaggggactgcctgctctctatcctaggcctggctgaggtacagccaccacaccccactcttcctggttgataggtgggctttcccttgccttaagacagaaccgcatatgggccacttttacgctgaaccccagctccagagagcacaatagagtaagacaacaaaatcagccatgtggaaaccaaaccttcaaatgaatccagtggttcttatggcatatttctcagctggtggcagtttctggagtgggactttgagggtagaagccatcagactgcttgctgatgataagacataggactaattaattctgcctcaagcaaaaaataaacaacaacaaggcagttgtgttttaaggggattttgtccagttttgttcgcttttcccattaatttattcaaatctttgagttaatatatagattaaaccaaggtgtttgtcatttaaataggtaatactatgatctcaaatttttaaaggaagcttttggagacaacatctttaatatggtaatgaagagagaagttgaaatcatgtaacttcatttacaaatcatgaatatgtattatgctttaaatgaaaagaaggactaaaacagatatagtgtttgttcaatttgctaaagagaagacaatttgtcaagattctttccccaaaactcaagcaatatgcaaatgtaggaaaatcagacccccgtgttaattccatggcatgatgaatatttttataatcctaattagtaccagtcatttagtctagcaatttcccccaatctagccaatttgaaattaaaatagatgccttgattacaaaactcattagcaaagaagcacccttctcactaaccagttcatttaaaatgcacaaactgaatgaagtgtggaacacttgtgttgtcaattggcataagtgaagtgagtcttaattggaagcattgtgaagtatttgtattgctgcgtgtttcattgccgtataatatatcattcattaaatgtaacaaaagcaacttttaaatggtttaattaaacggagtttgtgcacttggtaatttttataaaatcaaatgtcacaattgtttgcatttgaagtactgacaggtattaatgtcaggaagatgaagtctgactctgcatgtatcactcagattatgcgaagaatggcaggtttaatgtgagaggagaaaattaattatagaacattgacttcttacttaaaagtaccaacgtgcatattgtccttgtgaatttgggcataggaatttcagaactacctgatttatggctggaaatggagtggaagggcctggcagaggactaggagtggaatataaggagaaaataacagtctggaatttttcttttgtaatttcatttttaatcaagggaggaagtagtaggtggagagaaatgctatcctgtgtattttcatctactccaaagagcaatagagatgtgtagcaatgcagactgatgttctgtctaagcagaatgtgatgcaagtgggatgggggaggaaattggcttcagaccagggaaatgctgcagatggggactccacagaagtcccgaactgaggccagagagcaaggagttcaaggatgattttccagtggaagaggaggcacaatgggctgtaatagtggctgttctgtaggcataaagtataaggcaaatatagaagctgaggttcccctgatgtttcttctctgtgtaatgcaggtgtcagctgttgcctcatatttatgttatttcaacccacttcaacaaggaggcaaaactcagccatgtcactgatttctgtgagaaatcccatgttagcagacactgttgatgtcctgcctatacccactagatatttctattctagtgtgctcctgctgatttctgactgccaatatttgcatttctttgcctgagggctttctctgaggcctctggaggctactctacccctctgtgcagaaagctatagaagtacctgggaattaggggcagccttagccaaagatagcagaatttggtgtatagatacctcagctctttcactgtcatgtgtggtaactctgagacatatgtcttatactttttatctagaatttcccaatggaatgaaactctagttgcccacaaagttggccagcttcgtagcaccacatattgactgcgttctcttacttgggtaattttctactttaataccaatgggttttattttttcatctcccaaataaactacttacactctagtccttggcttggggcctgctcctggggagactctaaccagttgtgccaaatattatgtgatcttggtggtggtagcggaagatttgtgaggtcaaggatggggatcacaaaacctaggtttccacccaggaattaccctttgacatttctatgttcctaatctctcctgaacccctccaactccccaggctgtccacctgggacacctgtgaatatgttactctagggaaaaagggactttatagaggtgattaagttttatcccagattatcttgagggacccaatatagtcataagggtccttttaagagggaggcaggagaattagagtcacagaaagatgttacacagaagcagaggttgctctgagctctttgaagatgaggactggctggaaaaggcaaggaaatggtttttcccctggagcctccagaaggaatgcagtctggctaccttgattttaacctcataagcctcatttcagacttctcacttccagagctgttctagaataaatctgtgttgtcttaaccactaagttagtggaaatttgttacagtagcaataggaaattaatacacttaccagcccttcccttggcttcactggacctcctgtcccagagcaagcaaaatcaactgcttgtctccaccagcttcttgaaagcccaggcatcgactgacccagagacggtgcatccaggacatacttttgactccagtttccattgatccctgtggtcctgaaataagaaaagtttctccttgcgggtggaaaaaaaaatgttctctatattgtttacttattgtagcagtttgtttggggtgctatagcaaagtaccacagactgagtggcttaaacaatagaaatagactgagtggcttaaacaatagaaatgtatggcctcatggttctggaggccatacatttctgagatcaaggtgttggcagggttgatttcttctgaagcctctgtctttggcttgagcatggccagcttctctctgcatcttcataagatctttcctctatgtttgtctttcctctacgtgatctttcctctatgtctttctatgtcctgatttcctcttcttccttttttttttttttttgagacagagtcttgctctgttgcccaggctggagtgcagtggtgcgatcttggctcactgcaacctctgcctcctgggttcaagcaattattctgcctcagcctcccgagtggctgggactgcaggtgcgtgccaccatacccagctaattttgtatttttagtagagacaaggtttcgctatattggccaggctggtctcgaactcctgaccttgtgatccgcccaccttggcctcccaaagtgctgggattataggcgtgagccactgcacctggccgatttcctcttcttacgtgaacattgcttatattggattagggcctgctctaataacctcatttgaacttatttacctttttaaagacccagtctccatatatagtaacattctgaggtactgggggttaggacttcaacatgtggatttgtggggatgcatttcagcccataagacatatgcatgtcaaggttgctgaataatgaaagtcttattgccctttgtgtccctgctgccctgtgtgagggggacagtagaagtctcttcctgctgtgtagcatgagatattcccgagacatatggaatggagccaaccaccaggaaaattggcagtagggtgtaggggagggagcagggggtagggcttatttctgagatggaaaccagatccatgtgagaggccctgagcctggtcaggaagattccaagctggtctttggccttgaccctggacaagattaggaaatcatggaagacacaagaaaaaagatggtgcccagaccatgaggaccccttggaagaacatcgagggatcagagtctaaaagaagtctcagatggaaactcgtattttagaaccatggctatttgttgtataagctagacgtgttttgtttcagttttggcattttgtttttgttctccctttgtatttgaaaatgtcagcagatctcagatgtgccagaagttacagaaagtttggttgacctgaatgtgttgcaaatcttcctgaagtttatcattggcttccccttagcttggaggataaagtgaaagcctttagctcagcacatgaagccttttaacgtggatcctaactttctacctcctctttttaagcactccattcactcatgcaacaggaaatgtgtcttcctatttcacaccaaagtgccctggcacacatgctttcttctaggagtcctttacttccccacttcatctagctagttctgagtcctgctcatctttcaaaactcaaagaaaacaaaactttctggagaaagctttgcctagacagactttacctatgaaaccctaactaatctaggtttttaagaaacgtctagaaagaaaccttttttgtttaatggttttacatttattaggtatgttttttttttctctgtgtttaggacatttaaagacctgaatgagagttaaagaggacctgtataaaggttataattatggggctggaaagaaagggaaaaattatcgagtgatttgaaaacagaatcaaaatttttgactgcctagaagtcacaggggagagggtgcctgataacactgaccatgacaagaatcaaaggacatcatagatctgatggtctgattgcctacaaaaatatctaaggccgagggctatgcctgctcatggcacacttctttcctgacaaaggagatgcttgtttcccaaatgcactaagtggaagaggggagcgtctggttggcgctgttgccgaggtgcactgtagaggggataatcaccttcctttgtggttgttcttccctgtagttgcttttctgacattttgcctcgtgcctcccttggctgctctcagagccggaggcaggatctaccagtagctgtctgagtaagttattgaaacaggctttttaaaatggagactttaatttgaagtgtttggtagagataccagggttgtaatctagaagctttctaataggcagctagggaatgaatgaggggaaaaaagatacgttagcttttatttcttcaaatatgatcatgtcaatattgggcatgaatgttttcataattgaaatgctgaaaggtggctgggaaattcactctcccttgagtctatctcaggcatagatggtctcttgaactttctagcccagaggcttcagtccctgaagggagctttaagatttcattagtagatcattactcttgatataatctgcctacccttaggtttgcacaatgtttttccctttttttgatgctgaaaatgccagtttaataatcagggaaaaagctcatttaatctccattataggtatcatgacttaatcattaaagatactgaaaagtatgccccaacatttgtcttttttcctccaaagtagcttactactcaatagcagagtctgacaaatgctaacaaatatccatttttaaatctcaaagaaattttctcatagtgaatactggtaaaaaggaaaatgaagaaaagaagcagagacagcaaaatccatctgttcccttccagcacatgtctttgagagtatcagtaccctactgtctattacccagataccaaatgaagtacatgatactcaacaaatacttattgagcacttaccatgtaccaagacctagagatgcaataatggattttgttaccatctttgctatcatacagagagaactgctgatcaaataagtaactgatggcaattgcaataagtgctgtaaaatagaagcatggatggttagagtatatattagggaggaggtctgacctatctacaaaaatgtttgatatgatttctgtattgaagagttaaggtgttcactgagagtgaaatctttttagatgctcataagcattatttaacataaaactagggtcactctgtgagttgccttcagattttttaaacaactttattgaggtataattgacactcagtaaccgcacaaattaaaatatataaacttgataaaattttgatatgaatacacccatgcagtcatcactacagtcaagaatctgagcaaatccgtcaccttcaaaagtttccttgtgctcctttgtaattcttttcttccatcctttttcatcccctcaccatattcacaattggtggtactctttatatcactagagatgagtttgcattctctagaatttcatataaagggaatcataaagtatgaacccttttttgcacagcctgtttctctcataattcttttgtgattgatttatgttgtatgtttcaacagtttcctcttttattgtttcgctgataatattatgtggacatagcacaattagtttatccatccacatgttaacgggcatttggattgaacctaggaaaataaagttgcaatgagaattcatgtataagtgtgtttatgaacatttctcttgatttctcttgggcaaatagtagtggaatggctggatcatatgatagaggtagtttcaaatttttaagaaaatgtcaaaccatttcctaaagtgtttgtgctattttttcatttccactaataattcatgagatttacagtttctttatattcttagtaacacttggaatagccagtctttttaattttggcttttcttttttctttttcttttcttttctttctttctttctctttttttttttttgggatggagtcttgctctgtcgtccaggctggagtacagtggcatgatctcagcttactgaaaactttgcctcccgggttcaagcaattctcctgcctcagcctcctgagtagctgggatcacaggtgcacgccaccatgaccggctaacttttgtatttttaatagagacagagtttcaccatgttggtcaggctggtctcaaactcctgacttcgtgatctgcacgcctctgcctcccaaagtactaggattacaggcttgagccaccacacccagctaattttagcttttctagtagatgtgtattggtagctcattgtggttgtaatttccattcttttagtgactaaggatgttgaacatcttttcatgcacttattttctatctatatgttttctatggtttttgcctattttaaaatgggcaacttgtgttcttactattgaatattgagagtgtttctatattctggataaaagtcctttttcaaatgcgtgatttacggtgctttctcccatgtcatagcttatcttttaattctcttgacggtgtctctcaatgaagagaagttcatagttttgatgaagtacaatttatcaattttttggatcatattatttgagtcatatccaagaaatatttgcctaagtcagtgttacaattatctttttattttgccttttactagctgctattatagttttaagttttatgtttaggccaataatcaactttgagttaaattttttatatagtgcaagatatagatcaaagtttatgattattgcatatggataccaaattattctaacacagtttatggaaaagactattctttctccattgaataacctgtacagttttgtcaaaaattaattggccatatatgtgtgggctctattctatgtctggactctattctgttccattgatctatttgcttatcttgacaccagtactacattatctggatttcttggtcactgtggtacttcacattttcatatgaatttgagaatcaatttgtttatttctaccccctacctccaaaaaaatggcttttggaattttggttgggattgcataaagtccagtagactaatttgaggagaattggccttttaaacatattgagtcttctgatttgtgaacacagccatctctttatttgttttagtttccttttaatttgattcagtgatgttttatactttttagcttatagatcttgcacctctcttttaatcaggtttattcctaaacattgcgtaaacttgactttttaaatggcatttaaaaaaatttctgctgtttttgttgccagtacatagaacaaatggaaaaatcagtaagaacataaaagaattgaacaattcaaccaactaagttaactttattgacatctctagagcacttcatctaacacaagtagagcacacactcaagtgcccatggaacatttatcaagataggccatattctggtcatttgtgactgagtacaaatattgtaactttaatctggaaaatggtactattttactagtttctgagaaatatgaaaattacttaatgtgtgagaaagcattttgaaataattagagggattttcagagctaagacttaataatagaaaaaaaaatttttactaccaaaatgtgtcttcaaatgtcaagcaagtacaaacttctgccctcacctgtcactgaagaaggaaagttagcatctcaagagttcagtggagggagatccagcggggatgtgtggatgttgagaagagtggcatttattttttcgatgatccctggaagaggtgtgagatttgcacatggagaggatattctagatagtgcaaacagcccaaataaacttgtgaaggtggagaaagggggctatagctaagattagcaaggggaataataggggaatgtgatggagaataataggaaatgtgatcagaaagttactctgaggtcagagagtgaggtatttgggtgctaatctgggaaacttatgctttattatgtagacaggaaactatttcttttaacacagttcacatggaagttgggaactgtctatattaaagtaacaaaggctatttcagtaggtaatttctttcgtatgaactaaccattgaaaacctaaaggaaatcttcagttttgcctttcatcaatttcatatgaacccctaatttgtgtcataactttagacatgaacacttctgattgtgtttcttttgttttgagacttaacatttccatcaataatctgatcccatctaggaaatcaagtctagatcaggcaataccctgactctaaacctctgctgttataatcattggaaaaagcccactgtagatgcttccagtcttgggagaagaagaaggtacatcagggattgagggtgaggaagatgcatatatgtgctttttgttttcttggggtctgtcccttgaggattatctctacagcctttagaatctgggattcacagtcgagcacttacagatctcctcttcttcaatgtctgtgtcatgtgtgtatcttagctctgtaacatggctaattttctcatgccagagcctcctttttcattcagcaaatctttactgaggacttgatggatttaaataattgtacacaatgcttgtgtggatataatgatgaatcaatgaagtgtctccatctggtagaatggaaaaagtaatgaactgttaatcacatatggtgctattggaaccttagggacccagtaaagttctgagatgatcagcaggaaatggcctttgtagactgtacagaatgggaaaggcagaatgctgaatgttggagaatgagggggattttaccagtgaaaggaacctaccgggtgtttattaggtgctcaatacatacctgatgacaggtcagttatggaaaaagaggttcagttgggaagaacatataatttggtggaaatctcatagtttattcccagttgaaagtagacttccttgaaagagacagtgcaaggctctggaaagagaattggacttggattctaaaggcctggatttaattccctgattctctttttcccagatgtgttatgtcgggtggatggcttaacctctctcaacctgcctcattttctgtacattgaaaataatgatggaaagatgacaggtgtgctgtgagaatcaagcaggagaaattatacagatgtgctaagcactgttttgttgagagatctctgcttgtcataaaccagctctgcagaattctcctccaggcctcacagctgagcagaggatgtcaattttcatatgatttgaaattttcatatggttaacccaactcagaattcctgctccttcagggcagttatttttttgtatctcttcttctttgctactttgaattttaacctttctaagacttcaggggttgctttctctggactgaagtcatctgctaagattctttgaaccttcagtctccttaatgcttagtttttcagattcagaactagaaaggccagaggtctcaggcagaggaggccagctgggtaatagttggctaatgggaccgtacatcactgaggacagtttcccagtggagaatcatcggcccttgagtaatatgaagtgtggacatctgtgactggcttatctttactcgttaagtcacaagctggggttcggactccatttgcaattcatcaaggctcatgttctctaattacagaattaaagacaggaatactcagatgatccaggtctttgtctttatcgtggaagtatacacaaagggggaagttatgatgatgtgtgaatgatgacattttcagcatttcagcagtgccagtgtcacttgatggcaaaccttcgtattactggtgtagatgcatgccctcatgctccgttgtaaaagtggaaaaggagagaaaaaaatacatcatttattttaaaaccgtcccttttttgtttttactaatacttctaggtatataatttattttatatgctctcattggtaaattctttttagtcatttttgctgctgttttatcctctactttttcttaactggttcatacagaatctttgagctagataggtccaaccctgaaaacgtttgtatattggctctgaccagctgccaagtagttttgatttacatacttccagtttgagggagctcaatccctcagaaagcagacaattccagttttagaaaactctagttattagccaagggtttatggcattaaaataaaatctgcttcatctaaatttctgcctgttggaaatagttttcccttattcactaccttgttcaaatattgtcctgtgctctgaaatccataagcaagtcctccccactccctgcacaacttcaaatagatgtccttaatacctgttcctttacccttgtcttatggaggttgagcatctcttgctccacaggatctcttctgaaaaccctgatctacaccccatcatataagggggaggcagaagggtttattccccaggaggccacccttggccattcagacacatacaaagagtttggaagaatgctttatgatcctttactctgggatcatcgtggtccagcccattagtccacaagtgggactcagattccaaagtggtttctctgctccatcccactagctccttctcctgtgattattttatcccaggggttttcatatggccaccttcttgtgatgggcagatgagtttcctttctctgtgactacctgccttttacttggcccctggtcctccaaaaactttttttttcaataatgaacaattcagtatggtggtagcataaagtacagtcttcctaaagctcagctctggtcatgcattcacctgctgaatgaatgaatgaatgaatgaatgaatgaatgaacaaaatacaacaaaattaaaaataaatgtcccaagccaacaaaaagacaaggacagaatcctagaaccaatatttagggtacagaagaaaacagagtgggaatagaaactattaagtacctaatctatatcaagcactgtgctaagtgtattactctgctatctaattgtaatattctagcctctatttgttcattaatcccaagcctcatggtacttatttttgtgtgggtatacgtgtgttcatgtgtgtgtgtgtgtgtgtgtagctatgtgtgttttaaatattagcccattttcacatggacttgtctatgctgctttattataaggtgccccggattgtagaatattccccaccggtggtggtggtagtggtgtttgttttctttgttgttgttttgttttgttttttgcttctgtgtgagccatagaagtatcaatggacatagacagttttatgtatatttatctactaggaattccggcatctattgtgcagattttgtgagtccaaatcatattcatagctacagctagcttggggttttattttcttttgtgtgtcaattcctatgctaccaccaacccctgcaccctaatccaaggcactgatcagaagacagtttgctgctgcatgctcagatagtggccaacatattggagggcaccatatcatgtatcagataacacttcaaactttgtatattgggctcatttcccattgtttaccacataaggcataaagataagtgtcttttccttatgtaggtattatcactcacccatcagttcccagaacttaggtgtctttcccaaaacaccatgggtcattatcgagtcagatactgctttatttttgaggtcttagtttgattttgacactcagcaatttaattcgaggctcagaaattatttaagatttttgaattatactttatctattagatcaaaatgtttgttgggagatggggttctatccagttggaaatgtggcttttgtatttctcctagataattttcagactaaccatgtaaggtaggtatcattaactcagctttacagataatgttgtgaaggttcaggatagttaagtaagtttttggaggtcacatagccagtaagtgacagaggagagacatttaggagccagcaaaggagagagaagaagaatgtttctggaagcaggaagaaaaccaggagtgagcagtgcctttgaattcacggaaggagaatcgtgtaaagtttggagaagaatcaaatactgtagaggggcaagggctgagaaaattattggatttggcaattttctagagagaacagattgtgtctaagtggttctttgaagtgtgcctggagggcagggattgtgttgtcctgtatgcttccttcagcaccacttgaaaatgtgcacttaaatgttttttgatggtgatgttgattatccaaaacatttccttgaaatagcactttccattgcaaaacttatgcaaggatgtggggtcaggttcagcttcatgcttaccctttgaatatacttgttctctgggaggatgcctatagaacccctttaagggaaaaagatggaaaggaaggatcagttagtgacaggtcaattaaaagaagcagtttcgctaactctagccttgaaagcagaggtggaacattctttcatgaacacagacaagttattttgtagtatgctaagctcttcaggcacaatatgtctttcaatcctttggaaaaggacacaactgttcccatttcagagaagaggaaactagggttttagagcatccaagtgactcaaattatcagagctagaaatgacagaattgagattcacagacatgtctgacttcatagcagagcatcttaattcttcaggtcccacagtgggatctgttttaagtggttcttgaaatttccctggacacgtggggaatgtgactgccaaaatcaaaatgagagagatcaataggtttcaaattatctttcagacactaagatgtgtgcccaggtaggccccaggtgatggatgattaaggaccttcatagcctctgattttggcccactggtctctcctgaagagcagataaaagagtgtcgcaggctggagaatgggtgcctgcatcgtgacaaaggaggggagaccaagagattcaccctgcttcatatgaagccgtttctcaacctagctggaggtgacaggttcatgcatttaattattcattcttcccacaaacatttatgggttcattttcacagaataaccttttattgaagactgacttgtgatggcagtaacctcagataggtaggaataaggatttatatcctagagagtaacatgaaatgcctaccctgcatcaggcactgagccggggtataagggccacagaatgaataaggtagtgaagaggtgagctgttcaatacagaaacctctagacacacgtggctgtaaattaaattgaattaattatgaataaataaaacaattccatttctcaatggcactaaccacatttcaagtattcggtagccccatgtgactggttacctaccctcttgggtaatgcagatgtagaacttttgcatcattgcagaaagttctactggacagtgtcagtgagagcgagtgttggctctggagtcagaaggcctggattggaacctggctctgttccttagcatctgtgtatttgtatgtacttgagtacgttccttagtatttctgcttttcttcctttacctacaaaatagggagcacaattggaacagcaaaataaggaatatcatatagagtactcgctgtgttccaggcaccattgtattggctttatttgtattaagtaatgtaatactgacaactaccctactaggtaagtgctgttactatccccgtttcatagatataaatgcaggcacagaaaagttcatgcagctcatgcatggtggcactgggaagtaaaccctgacagctgggatctggaatcagggctttccatctttgttataattcctaacaatggcatcgctctcatagtgatggtgggagaattaaatcatttactccactaagattgtaatatctgcctggcatggagtgaaagctgaggaaatgttagttattataatattattctggccttcaaggaatttagagaaactctactttttattctgttcaggagtctaggagcagtggacagcctgttcctcttgttagtagaaaatagcaaaacatggcagataaaggagcttagtgggagacacagcccttagccttgctcttgcctaccctagatgtgtcactgcccttctctgcctcagtttcctcatctgtaatatggggattgaactagaatgtccccgaactctgcttgctttttccaaactctctgattccatgattaaatggagcctaatttgtgttgtgcaattcgaagttatgtataaatattagcttatgcaactggttaatcacttagtgtcagataaatatgcagagcaaggtgtttaatatgtttacataaactgtacaaaccacttttcattaattgtgcttttccagcgtcctagcaggagcgtgttgaagcagggaacttgacatgggtgcctgtccccctaacttttcatctggacctcgctttgatttattccatgggctccttcctgtgcacttgggaactggggctttgaaaatgtttatgccaacagttcagcccttagaactggcagcacacaaggtgttatctctgtcttcagacaggctatgcttcttgtgggcacttcatttttcatccagtcagggaaaagatgggaattaccactagtttacacctggatgccaaacctccttgtttcctcttatccctttcccctcctttttttctcttctctctcttttttttttttttaccagagaagatccaggatgatttcagggcagttatgggaagtttctcaggtgtgataaaagttctctgagtttttgttccattgatttttatgggactgtgggtggctataaaatcagagtgggtacagtgcagctgtctgcctgacagcatggactatgtaggaagcctggcggggttggggccagagcaggatggacagagaagggatgggctttgatgctgtaccagccaggctctgcctgggagcagaaggttgaccttggctggaatttcagtaagaactgagtgaagggactctctacggagggatgtgcagggtttaaggaagcaacatggcatggcaaggcacccaggaactagcagcagtaggaggcttttgaacctgggcctgaaggggcaaggacaggaaaccatgttactgaatttctagacagagctggaattaaggggtagggggtaccgaacagctgaagtcaaagggattggagcttctgccagaaacttggggactaggcaggataggaagtggagcagataaactctaacctctcctctcctcttcttaactaccagatccctgctgtttgtttttgtttttggttgaatgcaacaggatggcaaaacgcaaggaagccaggtgggctaatgcagccatatgggtgagccctgtgggggtatagaatagagtagaagaggtcagaaaatgactttggggtgagggcaaatggagaataatcagcacagacagatgtggagagctgtgtgtgaatgtgaggtaatagagtgaggtggggggaagtggggggcggggggagtgcatcgagaatgcaacgttcagtcttatcaagtctccccttcccttccaccattcataatcagctcctctctaaacaggccagcatgaaatacttactgaactataaccatggagaggcaaccatgaatatggaaagggcatttgatgtgaattaggtagatctgagttttctttgtaatcgtgatatagttccttattagctaagtagcctttgaccagttactcaaactttctcattctcagttttcatatctgtaaattatatgaataccacaagattgctaattatatgaataccacaggaatgctattaagttgaaattggttaatgaatataatacacctagcccaggacctggtgtttagtctcacattcattcaacaaatgcacccttgggtgagtagaattagccagggcttttgcattcaggtagccaacaggttggttaaaagtggatattcactgtatatacatagaaacaaacatggaactacacaaatttttgtgtaaaattatgttcattacagacatatatgcatagattcatacccaaagtgttaagaaggcaaagaccagggtgatataagataaagggaggaaagcttatattggggattagggaaatcctctctgaggaagaaatacaaaggctgagacttggaggatgagtagttgctagccagtgaagtgttcagtagtggggggaggaggaataatagcaggggtagaattatatacaagatggaacaccgttctcctttagatcttctccttcattggctattccttccagaagactttcatggttctgtctcatctttgtaacctctctaaataaagaagagcccttgagcacagttctcagacctcttttatctctgccctcactcactcccttcatgatctcatccagctctcagttataccacttatttgtcctaattatcagcccggatctctcccctaaatgccagacttgttcatttaactagctacttgatatctcaacatggatatcttataaatatgccaaataatccactctaaaatttagcaccgggtttctattcatttcctttcactaaatttcctcctctcgcagtttaattcttcaatttcttttctttaagatggagtcttgctctgtcgcccaggcttgagtgcagtggcgccatctcggctcacaacttccgtcccttgggttcaagcgattctcctgcctcagcctcccaaatagctgggattacaggcacatgccatcacacccagctaatttttgtatttttagtagagacagggtttcaccatgttggcaaggctggtcttgaactcctgacctcaggtgatccacccgcctctgcctttcaaattgctgggattacaggcatgagccaccacgcctggccaattcttctaatttctcagggcaaatactttggagtcttggctcttttcttcatttcataccctgcaatcagtccctaagcaaattgtcttgacctacttttaaaatacaaacagaatcacaacactctttacttcctcctcctctactcacttctggttcatgtcaccttcatccctctctcacatggattattgtaacaacctcttcctccctaatccacataccatctactctccataaagcagccagactgatccactaaaatataagtggtattatgtcatccttgcccaaaaatctccagtggctctcatctcactcagtatactttaggtcttccatggctcataagattatacataatttccacttctctctgccattgccacttctctggccttatctctctgtgccccaaccacttaattttctttgctcttcttccagttgacaaacacagtcctgtcttgcactgtttgggatatgattatccacttggttcaagttctcactccaggtttctgctgaaatcacatctttttggaaatgccttccccaaccatcctatgtaaaatctaacttcttctcaacttacaacaggcaccccttatcctgctttatttttcttcataatagtttggcatcattcagcatgttaattcttatctgtggcatgtctgttactcccagtagaattagagctctaggaaggaaaagacttggtctcctttgacccaggctgcataggatgggtgatctagacttacctgttgaccaacagggtaagtgagtgtgagaaagtcccagcacaagatcttcactctagtgacagctcacattctagtgaaagctccttccccaaagaagaaaaggaagttattctaatctagtgttagtgacttcctttcatcctgaagttctacctagtggttgggcattttaaccagttggttaattaatatttatgaggaatctacttattgtgcagccctgtgttcagtgttatgagagatacagaaaaatatgtgatataatttctgctctcaaggatctttacagtttagttgaggtgaaaatacacaaaacaacaacaacaattaataccaggcagtggtattaatatgaatagctatattccaggcagtgcaccaaacctttacattcagaatctcatttaattcttataacaagataccattgttatacccatcactcatcctcctcccagagaaacaaacaaacataagaaaacagaatcctagaaagcagaagtaacttttccaagatgaatgtgtgagtgtgagtttgtgagagggaagaaagtgagtgaaacaacagaagctgggttcagatccacctgcctgacattcagagccataattgcagaccgttttttctgaaccccctcccccaaccccccaaaaaatctggccacaaggtcagttcatgacatgaacatttattgtcatgtcttgaaataggtagtcattggttagttagttataggagtgcttactaggtaccaagcagggttgtttgtgctgggcataaaatgatgagtaacccatggcctggtcctgccttcaaagagctcagaaggcaggaaagaaatttgaaatcaggacataagctagaactccagaaatatggggacctctttcctgggaagaagtcccctctgggctgtataactggacttatcacaataaagaagggacttaaggttgacctaaaagatggggtggggggatgtgtagctgcagaggaatggagaagcaagaacaaagaaattgctggcctggcatgattctgattgcatggcgtgatttctgtttagcatttctgattcagcttgagtaattctgggaagcttttttgatctctaccaagctgccttaggtcctttacagttgctgcagacatatctccatcttagcattaaccacttcatattataaccaccccattttgcacaagactgtgaacaatagtgaacaagacaccttgtcttttcttctgggaatccctagtagtcatcctatagtaaatacttaatgatctgttcttggatgaaggtgtgcatttcactgatgtctcatgaaaactctctatgaagagatctccttcttcactttaacagcctctgaccaaggaaatatattcaaacctggctgaaattgaaggctgtgacaccattctggatgcatctatcattctgatgtggctttaagctgtcgtttggtacctgctatggtttttgttgcattgactcatgagaattccacagtgaggtgcttcataggcacaatgttgttagaggatgctgtccactctactgaatattactgaaactataatgaaaggtagttttgagaaggtaggatcaagctgaggttttttgtttttgttttttctttttctgagacagagtctcattctgttgccccggctagagtgcagtggcgccatctcaagtcactgcaacctccccctcgggggttcaagcaattctcctgcctcagcctcctgagtagctgggattacaggcatatgccatcactgctggctaatttttgtatttttagtagagacagggtttcaccatgtttcccaggctggtcttaaactcatgagctcaagccatctgcctgccgtggcctctcaaagtgctgcgattacaggcatgagccactgtgaccagcttgagctgagttttggctgcatgttttctttttctctttccccctttagcctaaggagaactatgaatacagacaaatactgttttagattctcagatctaacgcgtagttattgagcagttactatatgtcagtcatgtgctaagtgcttccatgtgaattatccttttttatatcataataacctgacaaatttggttcttattatttccaagttgaagaatttaaaacagggcatagagaagtcagtgatttaagactaataggaggagctagtgcatgtcagagccaaaggagaaactaattttttaggagaatctggaaaagtgcagagcttaaattgtggtagaaagaattcaagaaacagaggaaacatacttccaatgtaattgtatcctagatgtaaatgctaaatgctgaggcacatccaaaggggtattatgtaggtttctgccctcaagaagcttataatttagttggggagaaaaggtattcaggagatacaatttttgctgcagagaataaaagaatagatcaatagatcttcttccctgtaaaaaacaaacaaacaaacaaacaaacaaaaaaaaaaaaaaaaaaaaaaaaccccaaaaactgtagtgagaggatatgattttgtgttggcaaggccagtcagaaactgtagggaaaggaaaacagttaatctgttagagttattgattaatgtttgattgtattttgagtgttttttatgactttttcaataattttcatataattcaaatttttcaataatttttttcactttttcactttttttttcatttttttcaataattttcaaaaactgaaggaaaacctagcttttctttgtagtacaacagggccctggctgggaagaaaacttgccattcttttagaagatcatgggacaaaactccctttctccctgacttcccatttctcagtttgtggaaacatagaaagacttagaatttaataattgaaaggctattgaaatattccctctttatacagatgaggagataaaaacccaaacataatctaagatttgtcccaaagtcaatcaaaccctgaggcacaatcagaacagaaatctgactcccagctctggggtggcagaaagagcacaggacccaggttcaggggtgtggctcaagtgcacctctgctctttcccatgcaccttgactatctcactatgctgtgagtctcagttgaggtaatgatatgtactccacaagatccttaagaggagctcatgaagaaacatgaaagtactttgtaaactgtaaggtaacatatgaatggcagggattgttgataattctactcccctatactacttttgcaaaccctctagtaactggatgttcttctggttctatgtttctgctagagatgaaggatggaatctcagttagacaaaaagacaaagtcaaacatggtctttgagaaataattgtttttctcagacaagacctactcaaattgacagaaggcatcttatcacactggccattaaccaagatcattctgaagattatataccttttagaagcttagaagatcagggaactatagctttaagttgtgctctagctaataagtgattttccactgcattaccccagctactcttgcattcaataaacatgagagattgcactgtaatagcaaccagtgcacacagacacacactttaattaaaggaatacatcacacagtgaagtgcatttaaatgaaaaatctttccattggaagcatagtttcttttttttttttctctctttcagtggcacttttctgatgtttaaatacttctaagagtatggaggggcaggctagggtcaaggtgagattctccagggagacgctcagggttacagctgccttggctctgacagagtgttagctaaacctcatatagtggtatagtgacaggtgatataaacagtatctggtgtgattatacagtgaggctggtgaagggagctggtgcatatatgagttactgttagaggatttcttagtctcaggaggaggagtgatggctggaggaaggggaagggcagagaaaatcatcatacttcctggctgatgtaacactttgtggatgtccagcctgatgactttgtatgaaaagccggactgctgttgttctttagataggaaaccaggctaaaaagcccatgtgctcctctctgtgcctgttacaatattttatcccttacaactttattgaaaaataatttatgtctaataaactacattaacttaaagtatctagttcaatgagttttgagagtcataagcattagtgaaaccaccatcatgatatggaacatgtctatcaccttcaccaaagattcctcatgcctttgtagtccttctctccttcctcctctgaccccagaaaaacagtgatatgctttttgtctatttgcattgtatgcaaatacagcatacaatatgcatttctttcgtgtatctgacttctttcactgagcagtgattctcagattcctccatgttggtgtgtgtatcaacagttcattcctttttattgctgagtaggttatgatgttttaaggtaaacgcagttatttatcttaattgcgtggctcctattgctgattccagtaccaaagaaactccctatgtgtatctgaggtgaggtagtgtgtctccacattttgagagcctagggcctactctagtggccaacagtggtgagaagtatttcccagtctagattgcatagtgagagatggcctcccctctttccaaccgtcctttcacgtttccattcctctttccaccagtgtttattgaacactgactatgtcccaagcactgctcttggcacttgggtacatcatgaaacagaaccagaaacccttcccattgtgaagcttcttacgtctgtaatatttttaaaagttatagcatttattgttatagttggcctaacaacatatattgttagttggtcataaatactataaggaaaataaagcaagaaaggagcatagaggaagttaggataaaagagctgcaacttacatagggtgttcagggaaggtctcatcaaggcagtgacatttgagagagcataagtttcagagcattcttcagccagttctctgggtctccagcacagcattgacatctagagcatgatctactgaatgtgggcagatttttaagcgcatagaagggatgaagcatcatggcacccatacttgtgtttccaaaagcttctgtctccctagtgctaggtattctccctggttcatctgagttctttatgatgtttgattctggctactattcttagaaaacaatgtgaggaaactggagcaggtcaagaaaaaaatgcatgttcaaagtgaaggaaaatcatggtaaggaggaaatatgattggattcttttgacattggatggtttgtcaaggtcttgccatttttttttcctggtgaatgttctcttgtcctgaagttcagtatggttgataatgttgaaggttctgacaagaaagtctggatggaaaagagttaaggaggccttcttaactattaagatagtaacttgagactcctctagtcattcccccaataacatgcctaaagtcttgattcacactccaccctctggtttttaaacattttaatgccaggagttccacctttcgttttctccctccacacacatatctatgaggttgacttcaaaggtccaccagtcaagcgtaagtaaattatcatctcaagaacaaaagaactggattagatagatgcctagtggacactatgaaaatattgtacgttgaagcattctcgtgagttgttaacttcaaagcatccagagaagcatgaaagacgattaaaatcttgggctttaaagtcagacagacctgaggccaagttttacctttattcatggtcatatcattactaaataacaagctgtaaaaaaagattgtaaagcacctacctcataatgtgaaggttgaatgagataacaaactgaacccagcagtgtatacaaaagggaatgcgttatgattgagggtggtttatttctagaatgtaagatgttaatgttagaaaaatctaaaagtggaatttagtatactaaaggtttaaggagaaaaactacatcagtctctcaattgactcatgaaaattattgaataaaatggaacactcattaatgatttacaaaagaaaaacaagaaagcaaaacaaaggagtaaacaaaaaattattagcaaactaggagatgagtacttctttaacctaataaagattatccaccaaaaacatataacatattatttttaatagtaaaacattacaaactcttttaaaatcaggactaagacatggatactcagaaccacagctttaaatcaacaatgtactgggaggcttattcatcacaataaaataagaaaaaggaaaaaggtcatcttctatacataatatgattctctacatttaagactcaaaagaaactgtaggcaaattattaaacttaataattttaagttatttcaagcaaaatcaaatggatttttattccccagcaataatgagttagaaaacacaattaaaatataatatacacagtatatcttgtttcaatatccaacaagaataggtaaaacaaaagttgggcaaggtttttattgaaaaaatcttaaaactcttaaaagatactaaggaaaaacaatttgaatgaattaaatacaccatatacatttactggaatcctcaatagcatgaaaacataaaatctctgcaagtttctctgtttcaatacaaatcaatcaaaattgcaacaggtgcttataggaacttatcaaactgattttctaatgcacagaaaatagcaaaggtccaagagcaaaccagactcacctgaagaggaataaagggtgtgtggttggagtgggttgctaacttaagagatatcagaagttattgttctgtacttctatttagtttgtgtagacacacagacacacagacacacacacacacacacacacacacaggcatgggaaaattgacaaatggtacagaatagagaccccagcacagatctaaatatacatatatatatatatacacacatatatatacatatatatatacacatatatatacatatatatatataacaacgtaatataaaaaaattcgcatagcaaaaaaatggttattgagtaggctatttaattattattctgggacaattgggtattcataggaaagaaatttggattggaacctgttaacagatgtaaaaagcaaaatttcagatggacttaagacttaactgtgtaagacaaatgccaacatttaagaagaaaattttggaaactatcttttataccttatgacaggtagaggtttctgaattaagatgcaaaaatgctagccataagatgaatgtatataatgctattaattaaagtttattataatgaagaatagtagctcattaaaagattccaaaaatggtatgtgaaaagataagccataagcttggaaaagattcttgctgcacataatcctatcaaaggataagtatctattttgtataaagaaatattataagtttataagcaaaagatagacaagccaacaaaatgattgccaaaggagtgaatagccataccatttataggaaacactaacaaaaaatgctgtggtctgaatgtttgctttcccccaaaatttatatgtgaaacttaatctccaaggtgatgatatttaggaggtgggacctttggaaagtgattaggtcatgaatgtgattaacacacctataaggggctgaagagatcaaagttctcctcttttaccatctgagaacagagctagaaggtgccatctatgaaccatcaaatgggccctcactagacactgtatctgctggtatcttgatctgggactacccagcctccataactgtgagaagtaaatctctgttgtttataagctacccagtttatggtattttgctacagcagtctaaatggactacgacagaaaattaacatgaaaaaaggcataaccacattagtaatcaatgcaatgcaaattaagactatagtaagggactatttattacccacaagacttgcaaaattaagaacattgtaatttcagtatgggtgaggttgaggttcagtgggaaccctagtatgtcctgggtagcagtgtagatttgaacaactactttggagaacaagctggcagtacatttgaagccaaataagtgtaaattctgcaattgaacaacctactcctggatataaaccctggagaaacacttgccaggagacacatgcatgaatgtttacacataatttcttgttatagcaaaaaggctggaagtaactcaaatgcccatagatcgaagaatggataaattatattgacacagtggaatattatttggccatgaaaattgatgaactaagtctacatttaaccacatggatggatcttagaaaaacaatcctgaatggaaaaaaaatcacatcaaagtaggctttatacaggatgatgccattttcataaatttcagaaacaagcaatgcctgacaatatcatgtttcaagatacatacctatggggtagaattatttttaaaagcaaagagacgatggggacaataaagcccagattctggcaaatactcaccttttgggttcaggaagaatcatggagatagcttcaatggaagaagtaaggttctacttctttttttcttttttctttttgagacacagtcttactctgtcacccaggctggcgtgcagtggcgtgatctcagctcactacaacctccacctcccgggtttaagcgattctcctgcttcagcctcctgagtagctgggattacaggcgcacaccaccatgcctggctaatttttatgtttttagtagagatggggtttcgccatgttggtcaggctggcctcaaactcctgacttcgtgatctgcccccctcagcctcccaaagtgctgggattacaggagtgagccactgcacccagctgtaaggttctacttcttaacttttggtggtaggatcacaagtgttagtattgtttgtttcataacttaaatttatgttatgtattacatattagaaatattatataaatatatatatatatatatatatttttttttttttttgagatggagtctcgctctgtcgccaggctggaatgcagtggcgcgatctcggctcactgcaacctccgccttccaggttaaagcaattctcctgcttcaccctcctgagtagctggactacaggcacacaccaccacgcccagctaatctttgtatttttagtaaagataaggtttcaccatgttggccaggatggtctcaatctcttgtcctcatgatccacccacctcagcttcccaaagtgctgggattacaggtgtgagccactgtgcctggccttataaatatatattttataaacctaaaatattacatgatttttagcgagcagacacataacactgaagaaattgtagagctgaaagggctcagcaccatgtctgtagtctaaaagcagtaacaacaacaacaacaaaaaatagctgtcaattttataacggtatctatttctttcaaatggtgatgacttttttttgtgttccctcttatatgaattattatagaagatgaagattgctgaaggctctatcatgctggctggaaggtggaccctaccgccaatgtagacagtattatttctgtccgccacttcaatctcttgtcctggcagaggttgcattatctctctactcattgtgtctatggggaatggagggctggcctactcaaaactcacaaaataaatgttactctgagctgaagtttaaaaaacagtttcctaaaacaacatatgcaatattattaatcttgaaaactgcctgggggaaagatgtatttaaactgatttgactcttggaatcaagagagcagtgtactcatttggaggacagcatttttaacaatgactttgatgcaatacaagaaactccattacatctcacttaaagattcagttttacttattctcccatgctagtaatatttccttctgccactttgggtaattatcaaagttattcgttataatgaaggggattttttttttttgagggaaccgtctgcttctgctggtctctgcatgaaatgattatacaattggggtttgtagctggggtggagatggaggtccccacacaggaagtggtggtggtaccagtagaaaggccctgccttaggggggcagttgtgtttaagtgactcacaggactccaagatgcagtgaaagaataggaaggtggtttcccacttccaactggtgctgacaaataaagagtcttctctgctgattcagagatgagaaagagtatcaattaaccacaaagtctggttggattagccagtctgcaagggtttgctagcagcataggatatggttaaaacatggacttttaaagatggcacagtccagtctaaaaaaatggggaggcactcatgggctttatggcttctattattattagtagtattattattggaaatagaatatggagatagagatgtgagaagtcctagcacataaaatgttgctcaataaatgctgcattctaaagtgccatggtcttccttaagtttcatttgtttcacaagggtggatccttgtctgttatgatccactccttatcccttaaactttgctcacatttatgttgggtctaaacatgcagttgtttaccacttgaaatcatgaggtccttgattagaaggaactcactgagatcattttttatattccctgtagtggaataagaattgtatcagccaaagcacaatggaccagcctctaagacttggcctctttcatggggtgttttctggctgatgtaatctatggaatgcatttctttctctggacctagtttctaagttttacatgtggttgtatgctgtgtagagtaaggaatggtagttgaaaatgacaggatacctcaactgaattagccaaaggtgaatttatgggctaagttagctgtgatgttcaagagaagacctggcttcaagtttagccaggtctaagagcaaatattgtgccagtgttgctgtcttgttttgctctttcaatgctttgcttctcttttctggtggtgtttttgttctcaggcgacgttcccctcagaggggcaggatggctgctatcaactccatgcttctgtcctagtctctcagtaactctggtggaaagagagctccttcctctagcacaaagtcttgggattggctctgactgcctctcactgtgtggcatgcccaccctaaactaatggccaaggccactgcagttggattggacctggatgatgtgctaatccagatctcaaggttggggagagttttatgcaaatcacatgaactaattggaggaggagtggtcccagggcaattaggggttgctggtagatgcagaagttggcatagggcaggaaaacaacaaatataaaacacagatatgttgctccttgtagaaatgtggatttgacatttttctgaattaaattgtaaggttattacatatgagcttatgtttttcttcttccctaacttttgaaaacaaaatatagcaataattctacaggctcaacaaaattgaattgaattgtctccctcaggagaggctagaagaggccatagatatagttgctccttcaaattctcccttgactaattatagttatatactctaagtgaatctctctctcactttctattacctctctctctctcaaacttatattattggttacacttatgaaatattttaaaaatcatccacatcatctgccaaactccaatctgattttttttccttatctcccctagttgtatcaatgctccatccattcttcctgtcactatcttgggacttccccctcttccttgtcctccatgttgaaattattatatctggctgtcctatcactgtcttcacttcctttttattttcattgttatcacctcattttttatctttgtttgacaacacctgtagtggcttgctaattcttcagatgtccctctttgcctcttccatttaagcttctttatgtactgacaccagattaaaatttctacaaaactacatatctgacccttcttcagaagccatttctactctttgttcattttacagatgaaaaaactgaagggagaatatgaccattacttaatgtcattaaatcagtttgtgctactctatatcgtatagtatgtcattccacataggagaatggccagttgtctccattgcccacacttcaggttggcatttgagtctttcagtctagatcccacctagcatttctacttctcttcatatacttcatgttttagacatgtttgagttgcattattttctgtaaacatttgctagccttcctctttccatctcttctcttacctctgcaactcacttgctaatatatttccatgatcaagtgccacttttccatgaggcttccttcagtcaccagtgaaattgatcacacccctctgaagctgaacattcctctcttcctttcatctaatcaatgttaagcgtggctatttatcaagtgtctcctatgtgccacaaatattttgataggcaattattctaccctgttccatgatgcacattttgtattttcacataagaatcatgttggagagaatttgtcttatcatcattgtgactcttccatcacaataccttgcacacagaagaccatcaataggcatttgttaaatgagtgaataagtgaataaataaagaaaatgtaattattgctgaattaaagattagcttgttgcaggggctcatttttctggactgaggttgcagatgattctcttctgtattaaaagggcattgattaccatagaaatacattcacttctcttgccttccattccatgaattttgcagcagtagcagctacttacaattgaattttaaggccttagagctccaatgctttatggctttacttaaaccaagtgacgaaaccagagcctaagttttcactctctaggaaatccactgtctcatttccaagacctagtggccgtggtcttgtttcagcatcaggaagctttttggctctgttattggtatccatagggctgttcatatacctgtcactggacatccaagacatgggactcgttctttatggaaagaaagtcttttaaattaagggcctcgtaaatactgaccacatagaatactttcttccaaatgaagttaccaagtcttcattggctctcctttgctgtcaggatgaactacaagcttataaacttacaatttcatctattcacagtttgcatcatacaagtgtcactcatctatatgacataggtgtgtcatcgtattctctgtgcaaaccctctaccccaggtttatgtcagatgaatattggggatagtaagaccatatagataggaatagtttcacactatggtaaattagagagcacatattctgcctaaagatattcaaactcattaaaatactacttcagcaacataaaaataaataaaccaaaacaactctcctttctccaaaaaacttatcacggacaaataataaaaactatgtttggcccatggatcacagtattgagaattctgtaccaattaatcaataaacaaataaggtacctgattctcaccgtcacctccatttaccttatgctgtgctgttactgtgccattgtttatgaaggactttctgccattcgtggagggataccacatcacatgtcactcagccagaaagatttcccttccttgtctgagttcgtatgatactcatcatctatatccttggccacagtacataatgtctaactttgtagtaattattgcaagcatcaccctcttcttggagatcatatactgcaatgttcagagtgtgtgtcttaggcatccccatgcccaaatgcattgcacaaagcctagccattgctagattctcagatggcacccattgactggcacttgagccatcagcatgtatgtacactttcttagtttgttttgtgctactatgacagaatacctgaggctgggtattttattataaacaaatttattgtctcatggttctagctgctggaaagtccaagactgaggggccagcattgggagagggtcttcttgtggtgtcatcccatggtggaagggcaaagagagggcaagagagagcaagaaatcaaactctcagccttaagcccttgtatgatctatattaatccattcatgagagtggaacccttatgaacccaaaacttcccattaggccccacctcccaataatgttgcactggggattaagtttccaacacatgttttctgagggacacattcaaaccatagcataaactaaaatgttattaaccagtcaatagaatgtatatcttttctttgctcttttagaattcaagcgctcttttcctctacctgaactctgacacattccaattttaataatgaataattcgaagaactagtaattgtaataatgttccctgagatgggataattttgggtgactcacatgacccatttataaatacataccgcataatataacatccatctctgtggttttgcccttacaagtaccaggaagccaccagctttcatctgttttctcatggtgtctccattctgctttagagcttgcagttaagagaggagaaagttgagagagaaatttcataattttaaaagctgctacttccagccctgtgcttacaagcttcctattctagcaaccaaccaaacaaaaagcagttcttccatggaaagacccaaaggaaacttaaaatgcgtattgctaagtgaaagaagtcaatctgaaactgctacataatgtatgattccaactatgacattttggaaaaggcaaacctgtggatacagtaagaagatcagtagctgccaggggttgtggggaaagagggataaataggcagagcacagaagatttttggggcagtgaaacaattccacattatagtacagtggcgactacatgtcatccctttatcaaaacctgtatgaatgcacaaggcaaaaagtgaaccctaatgcaaactatagacttttagttagtaatgtatcaatgttgtctcatcaattttacaaatctgtggggtgacagggcatatgggaactatctgtttactttccattcatttttcttttcttttttttttttttttcgagacggagtttcgttcttgttgcccaagctggagtgcaatggggcaatctcggctcattgcaacctctgccccctaggttcaagcgattctactgcctcagctccctgagtagctgtgattacaggtgcccaccaccacgcccagctaattttttgtatttttttttggtagagacaggtttttactatgatggccaggctggtctcgaactcctgacctcaggtactttccactcatttttctatgagcctaaaatgtctccaaaaatattaattttttagaagcaattctcaatttaagtcattaagacaataaagatgtatcccaattgtcaagaaatgacttcttagaaattttatccagaatgtcattgtgggacacactgggagtgtggggaaaggacattgttattgtgaccgtgggcaccttgatttggaagtatacccagtaagcccaaaatgagttacatcctctaagcacctcttccaaacatggagttttaaaacaggacttgagttaaaacaggacttgagttttaaaacaggacttgagttttaaaacagcactaaggtgccttgatgatcactgaggctgtgatataataaaaaggacttgagaagaaataggatttaaaaaaaaataagagtgggaggtctgcagagggtacttcaagggtggcctggttttaatatgctcccccctctaccagttaatgacccacattaaggtaccttttccactacctgcctcttctcaggctcaccttctgataggagaatgtggctatatgccactagtgtaagctgttcccacaaactcttctatttggtgagatggcacaattttggagttctcgccattctcaaatcaacagaattaagtgaagccaaagcccacacatatatgggtctatttattttcattcagttactggcttcatttttttattactatgtgtaaacaaggtctggaaatagaagcacatatgcagatttattttttaatcccccaattcctgtctgctggctgctgctcctgaaattgcttggcccatgacaatgactgcctctaagctcccagccagaagaaagagatcagagagtttccaatggttggagggtggagaactgtggggggagcctcctttctgagttaggaaaacatctcctggtcttcccatctttggcactgatggattgagtgattgttcttggcagagcagtggttttttttgttttttgcttggggctatcagcagtaagctgtttgagtcgcaggctgtgcaccatgccatcttggcaattctgtattttcagcattttagtcaatgcaaagagtaagagaaattgtaattgaggctgcctttctataaatcatgccacagagagtgagcacatccaaatgatgggtccaatagaaacttgtgttcctcgcctggggacaatggtggggggtgttgcaaaatcagtccaaggcgtctctgtggttgctgagcaatgcagtgaggaagaaatggaaaataaatgctaagtttcctggcaaattatgaactctggatagggataggatggtggggagacaaatagtatgaaattatcaaaccgtaaaatccagttggaaacaggagggcaagatcacatgcagagtagttccaattcacttactcacgcaggcaaggagatgggaaggcactggcccaaggagaagccagcttctcctgtcccagccgaattatgtttatctttgtaatttgattttgtcatggaaacactgtcagtgttcagtgttctttgtgcaataatgttcatgtcaaataagaaagcaaagtgatgggaggaggcatctgtagctatgtgttcttcacactgtattgtttgtgatattcaataacacaaaagtaaactgtgagtgagagtaaattccatggaccctactgtgcttttgtgagtgtccttactggttttcctcaaaaggtggcacactcttttttttgttgttgtttgttttgttctcatgtccattaaaatagctgcctttgacttttgtctctcactgttctttgaggtgtcatgttaccaacattggagaggtgtggggtcactgtgcagtcagacaaggatgtaggcccatctgtcagggttattagttttagaaaaggactccagcattgatttcatgggaacccacagccctgaaataagaagagaatggggcaggagaaatggagaagaggagatcagatctttgcctaacctgtgtctttactgttacatgtttgaaggcatatgagttttgcatttttgtttgccaagggaggctccaacagccccaatccccattccccactcattaccctgcaaatagtcactggattggagtttccacttcaggcatcatccaaaatggagacagcaaagcaagcctcattattttttatatataaatgtatgcatgtgcaccaactacctgcctaagaattaaacaaaggtgttttctgggtttgaagctttcagaccgaacgtgtaacaaaacaggcctgtgtgcctggtaagtaacatttcttagctattgtaaggtcaggaacttctgctttgttaagtgcaatgattttacagattttatactttctttatttccctcttgaatttctatagtgagttctttttgaaaatgctggcctctagctgctgtaccgggagaactaaggaaaaggattttgtctcatttttccatttcatctctgccggtgctgggaccagacagaagggtagaaacaaactcagaggaaaaagtacccttccttcaacagagatattcctcaagagagctgttttccccttgctcaaaccttggaggaatttgtgttttgttggtggaggcaattcccttgcataagggcttttagctctgttggtgtctctccctgagagtggccctttacactttaaaagcaacaagcacatctggaggcaagatcagctggtagaatgaatgaatatggggaggagagccaggtcctgatagctgtgggctgtcctttgagcaacaagtcatgtctatggcactacatttacggtggctatgggcttgcctgtttaggtttctcataatcctttcttcccaaggagattctagaagcaatttaatcatcagctgaaccacctgagctgaaaatttttgactgtgtgtttgaggccagcaaaattatactttctcgtgtctttcttcagataaattggagtttctgtacactgggatttttgaatctcactccagtgctctttctgtgcagcctcgagcattgcctggcattttctagcttcggaacttgtattgagagctttttcttttaatagtcgcctgtttggttgtttccccaaatagacttcaggttcctccagggcggttgtgttttgtttctgccttatccccagcccttagcagagcacacacaatagacaatttataagtattgggtgaatatccgatgcctgtactgctttataattatgtcttctcaaacacacacacacacacacacacacacacacacacacacacacacctgaagaacaagttaatgcatgcaaatcttgacaccctcacaactcattactttcctaaatttaagttacagtaagtgacacccctttctgcgggctcaaaatcaggaagtcatctttgactctttctctcaaacccaacttcagtacagcagcaaattgtcacttctgccttcaaaaaatatcccggatgcgatcagttctcctatcctcctccactaattagtcaatggggcccacagtctcagagctatctgtgactcctcttttttcctcagacctcacagtcattctgttacacatcttattggtgttacctccagaatattttgcaaatccctccacatccctacctccatgcctaacacactagtccaagccaccagccctctcccctggacagccacagtcttctctagactcgccgctccactctgtgggttccccactttctgctccacagagttgcccgtgatctttacaggtcactaaatcagattgtgggcagtcttctctttaaatgcatcagtagacttccctgatgcatgaaaggaagcaaaatggaatcatcattcaaccagcaatcccattattaggtaagtacccaaaggaaaataaattgttctaccaaaaggacacatgcacttgtatgttcatgacagcacaattcacaatatcacagacatggaatcaacctagatgtccatcaactgtggactggataaagaaaatgtggtacgtatacaccatggaatacgacacagctgtaaaaaagaagttaataatgtcctttgcagcaacatggaatgcagctggagaccattatactaagtgaattaaggcagaaatgcaaaaccaaataccacgtgttctcacttataaatgggagctaaacattgggtacacgtggacacaaagatgggaacaatatatactgcggactacaagaggtgggtgggggaaggggaccaaggggtgaaaaaccacctattgggtgctatgctccctgcttgggtgatggcttcaattgtaccccaaacctcagcatcacacagtatacccctttaaatctgcatatgtacctcctgaatctaaaagaaaagttgaaattaagcaaacagaaacgccaagaccctgtccaggtaaaacctgcctttgacgtgatcttgtccccagctttctctctaacctaacctctgttacttccctcctgctcgctgtgctccagccacactggcccatactgttcctcaagacgctgtgggtctgtatccttcccatccttccatcctaggtgacttcttcagatgtccacatcacctgccctttcatttccttcaggtttctgctcaaatgatagctcctcagagaagtctcctctggcttgtttaaaaacgatgccactggactgtatgaaaattagcttgatttaattcttccacattgtgttcacggatcataatatcacgttgtaccccataaacttatgcaagtacaaattgtcaatgtacaataaaaaaagtaccactgacatgctctatccactttctctgctttaattttctttgtagcagctactgcttcatgacactatataataatgagtggatcctcattatttgcaattccctatttatgactttgcctacctgctgcagtttatttgtaagcctaaaatctatactcaccatgttttttttcatggtcattcacagacatgcagagagtggcaaaaaatgtgagccacatgatgggcacatactcagctgaggttcaacaagcaacactctgccttctggctccagctctgatgctgtccacaagtgtcctttgatggtctattttgtgccacatattttgcacttttgtgctttgtttggtaatctccttgtttaaaatggcccaggacatggtgctgaagggcttcctagtgctcctgagcacaaggagactgtgatgtcccttgtggagaaacacatgtggtagagcagcttccttgctgttggccatgagttcaatgttaatgaatcactatatgtatttaaaacgttatctttaaacagaaaacacctaaaacaatgtcgcatattgattgcttttataaaaatattgtgaccagagacacgtagatacttaaccttgtatttcccctaggaactatagtcagtattcactaaatcaggttttgcagtggctttatagatcataactaccacaaataatgagactcaattgtgtgtgtgtatttgcttacttacgtatatataagtaggttttcttattgcccatttctctcattaccatgtaaactccatggagtcaggggtcagtaccctgtgttttcccagattcttattctctgctgttttctcagaatctagaaccatgcctggctcatggaaggtgctcactcaattactgaatgattaaatggttgaacaaatgaatgaaatgtagtcaagaatgtctcagggaaagaaactctgacaaaataacagtttcctgggactttattaggcatcatgctgatctccagtcttgccatgtctttgcaaagtaagtattattagcagcttctccactacctccccgtgaaatggcccacccaagatcacaggacagtctggctcaggcactccatatatccaccttgtgaatcttggtgggtgtggtgtttgagcacatgggccatgaaatcaaacagcctggtttgaatccaacttcaacccttagtctgtgtatttggaattaatcctctccaaaactttatttttttgtaccataaaatgaggataatcaaacgtcctccacagggtggtcgtggggattaactgggatgatgcaaccacttaacctagcacctgacacataataagtatttcttagacattagttcttattgttatatgctttgggcccctggtgttagaggtcaaagagatgcaaaaccaagccaggaggcactcaggataaagttccactgtcagcagcccttaacaagttctcaagatcggtacctaagagcaggggtcagcaaactttttctgtaaaggactgaataagtgaatattttaggctttattggccatcagatctctgccacaacagctcaactctaatgaaagtgtggctatgttccaatcaaactatctttacaaaaacgggtgggtcatagttggccaacctctgctttagatcaaggctactcaaccctgcctctgcattagaatcagctggggaactttaaagctacctctggccaggtattctattcccagagattctgatttaatttttctggggtggggcctaggtatcaatatgatttacaagtcacaggtaactctaatgcagagttgagaaccactgatttggatcattaaagccatgggtagaagagtctcaaagcagatgctgtcttcctgtctccacccaagtttctttctcaccccattttaaaatccaaggacaagcattgtttgagggctttgggtaggaattggccagtctcagtaaatcttctttgcttaatgcacagaccatatcccttttgtatctagagggaaacctaattatctgtctaataaatgaattgtactttcaggaaatacagtccagctgttactctgcattttagctgaggctgtgctttttgctgtctaattgtctttcagcattggcagttagaatggttttgagtggaaacagtcttccaatctcctttgtcaaagccgtggcttctctgatggagctgggagtgggctcccaggagtcaaaagatctctgtcttaaggccaaggtactcttctttaatgagtcctagaagaagcttatgacattcccttctttaagaagcttcaaatactcagctagttgtcatcccccatttgatataggggtagaggttagctgaagacagggggataaacttagtcataaatatccaagcttcctcaagaattacctgaacagagtttctcccttcttccccatttgcattaaaatcatctgggagcttgttaaaacgcagacatctgggttctattcctgacccactgaattggattttctggaggggatactggaatgtacatttttaacaaggtatctggataactttgaaatttgagagctgctattctggggtgagcccttcaccctacttacataagactgagattgaggaatttaaagtcttcttcaaaacagcccagttagttcattgctgaagctaggagttgggtctgactctgtgtatcagctagttaatgctatgtaaccatctcccccaaaacttaatgattttaaaacagtaaacattcattattgctcacatatatatgggtgatgtttctggtctcagcgagattcacttctgcgcttattgttaactgtggttgagtaggcagttctgctgatcttggctgggctctcttttacatttgggtaggttggctgcatgctggtctgagatggtctcagctgggatgtctggattctcttctatatggtctgttacctccagcaggctagcatggctgtgctcacctaatggtcacaacattctgagagattggaagtgtccaaggctcctgcacaaaacagggaaactgtcatttacattgaattctgataccaaaacaaggaacaaggacaatctagacttagggggtgaggaaagaaatcctagctctccaaagaagatgctgaagatccttttttttttttttgagacagagctttgctcttgttgcccaggctggagtgcaatggtgggatcttggctcactgcaacctccacctcctgggttcaagcgattttcctgccttagcctcccacgtagctgggattacaggcatgtgccactatgcctagctaatttttgtatttttagtagagttgaggttttaccatgttggtcaggctggtcttgaactcctgacctcaggtgatctgcccacttcagcctcccaaagtgttgggattacaggtgtgagccactgcacctggcctgtggatcctttttacaaaggtcttagatacagggaggctgaatgaatctaccagagactgttacacagagtcctgggccttttccacaacattcaagtacctttaaaacatgtatgtttggccatgtgtagtggctcatgcctgtaatcccagcactttgggaggccgaggtgggcggatcacctgaggtcaggagtttgagaccagcctggccaacatggtaaacccccgtctctagtaaaaacacatgaaaaaattagccagggttggtggtgggtgcctgtaatcccagctactctggaggctgaggcaggagaattgcttgaacccaggagttggaggttgcagtgagccgagatcacgccactgccctcccgtctgggcaacaagggtgagacttagtctcaaaaaaacaaacaaacaacacacacacacacaaacacacacacacacacacacacacacacacaaaaacatgtatgtttgttttacaaatgtttagggagcatcagtagtgaacattcccttgggttctatttctagaattattgcttttggatgaagaatcaaaaattatatatctaaaggaacctaagaattcattgttttaaaccctagcagatactttaatttcctgttaatgtccccttaatcaaaatgttcatccatcttctgctgaaacacatcacattactccctggagaacttgctgccgtgtgaggcagctccttccagcctcaggaaattcttaccaagaggatattatttcttacattaagcaaacatttgcttctgcctagatttcaccttttgtttctgcttctgccctccaatgctacatggaagaatgtctcattgtcctcccaacctttgcctgcacctgaaaacagttataaacatctttccttattgttcagtcttctctaccagctaatccaagtttctacagtttttccctggcgtatagttttgagctttctcaacaattcaggttgtttccttgaaaatgtttctcagggccaggtgcagtggctcatacctgtaatcccagcactttggaaggccgaggcaggcagatcacttgaggtcaggagttcaagaccagcctgaccaacatggagaaaccccgtctgtactaaaaatacaaaatgagccaggtgtggtagcaggcttctgtaatcccagctactcgggaggctgaggcaggagaaccgcttgaaaccggaagacagaggttgcagtgagccacgattgcgccactgcactccagcctgggcaacaagagtgaaactccattttaaaaaaagaaagaaagaaaacatttctcagtggcagccaaggattttgggatgagcgttggttttagaatcagataccctgaaatttactttgagattttgagcaagttcctaaaacccttggaacttcagtatcctccttcaggaagtgtggacggaaatcaccatcagtatgtattttgtgtcagttaaccactacaacatacatagaaatgcctgtcagggaaatcctccatatatatgagtttctttccttttttactcctctgaaagaatagcctttgaagtacaagttttcttcctataatattttgaatttgaatgaactcagattttctgagcgctactaatactaaaattatgaggatatttaaatgtccttctggaattatgtttcaaatggcatttcatgtggtaggaatagcaaggttttcatttcttccaagttgaacgtagctattattattttgatacttagagatagtaatttaaattaaataaatgacctaaaactaagagatttaagttcttctcacttcttttagattcaggcctttgggaaggaaaaacaaatctgaacctggaaaataattaaggacaaattgaacacagtgaggaggccaggaaagcaggcaataaagtagatattaacaataggatgtgatgtgaaactaaaacccttagagaaagagaaaacataggtagagggtggggtgggaatgtgggcccatcatctcatggaggagtatcagtttttgttcaaagggtatggcttaatatgagatatttatgaattgcagcatataaaatgaataaaatctgattgcagaggaaaatggttgagggaattggactgtggagacaaaagaatggacttcagtaaatactgtgtaaattgtaaggttgtcttatgtgactattagctcagaaaatactcttcagtataaagaggataaaaggaattgtggaaatgatttgtaaataaaggtgctagataaattcaaggtacactgccattcatgcacagcatactcaaatgagacattagtcctgtgaggttatattaatttgtttttctttcaacagcaagaaggtaacataaaagatagtatggtgtagtaaaaagagcattgagtgaagtcaggacctctgggttcaaattccagctctacagctgactagctgtgtgaccctaggcaagtctcttaggttctctgagttttagagtctccatgtgtgaaaagaactgtccaggttatctctaaggccatgtttatgattctctgatcctatgttgttaagcagctcagtggcagtttctatggggagattaagatttcagatgggattcctctcatctaggaacttctattctacttgaagagacagcctggagttttgatgcataagtgaatgaatgagtaggttgatgtttggatgagttacatagagacaattagagagctataagagaagcctgttattagaagctagttggacactgtcattaaatatcaaaaaagagagatggtgtttataggatactgtttcttcctcaccgacttcctatggttttataatttttctgaactagttcataatttttggtattgtactcttacctgttttggccaaggatggcttcatggaaaacagagaattagaactaattttgagagaaggatagaatttttacaaattcggaaaaggaaggaggatttttttcaggtagaaagaatagacctttaaaagatctgaaaagggatattcatgtgttcattcagcaaatagtcattgaacatctgctcttcccatacctggcacagtattaagcacttggggttattaaggaaggaattcccactatctagaaaggaagatatacattgatcatgaaattatacaaatacatgttttcatgctttgatgaatgttgtggaataagagaacggagagccgtgagagcagatgacagtggacctggtgctgtctggggtgggaagtgaccaaagaggacttcccttaggaagtgttatttccgatgacacctgacatatgagtaggagttcagtacaccaaatggaaataggaagaagtccaagtggaagaagggtgttctagatagagggagtagcatgtgcaaaagccctgagactagagagttcatggcatgtttgagaaactaaatgggaaccaatgtggctggaacttggaagataagtcagggaggggaaaatactggaggaaaaggcaggtgggagatgagcatgatgtcatccatttgacagagggtaaacatcagtgttagtataagccagtttctgcatgcttgactgaaggaaatcactctatttcatagggtaggcactggggtatatatatggggcaagcctcatctatgatctcaaatggattttgaggtgcataagcacgtcttccagagaggaggatactgacttgggaaacagaaggtttgatcatccaaagatacaaatgtcctttgaaattggaggcaaagtcagaaggataagcctgaagaatcatacaaagccatggcaaaaataaggctgccatattaactggcacagtctgctagaattgctttcttggaagtatgacactgcctaagactccatgtttctttccctcccccttgttcatataattaaggagacttaagtggaaaccctgcccatacagtatctcttcatattcaagtctaggattctaattgccataggcactaaggaatgaccctagtcccctcttgtagtcaccctgcacaaaacacacttgagacaattaaatgagtcaacccaagcattagcacctgctccctatcatgaggatatcactgctccctaatcacatgtcagcaatcttgttgtcactggccctatcctcctcaaactggggctcaaaaacatacccctgggggacagtggtaaaaagggagtatgatagacacagtgtttttctggagggtctgctttaactgaagatttatgaagaaatgtattctgagcatgggtacagtatagaacagattacaaaatacccatggaattttaaggtgagaattattagagaactaaacatatttgcacttgtgtttaagatcaagtctccagattctctgggggatgctgtattcgtttggcttttggagatgctttgatggaaaactttgggaagctgtgatccttaagctatctttttaaatttagtcttgttttgatactgtttataaaataccctgcccttctcaccaagtttttttttttttttctttttgagatggagtctggctctgttgcccaggctggagtgcagtggtgcagtctcggctcactgcaacctccgcctcccagattcaagtgattctcctgcctcagcctcctgagtagctgggactacaggtgcccgccaccaggcctggctaatttttgtatttttagtagagacggggtttcaccatgttggccaggatggtctcgaactcctgaccttgtgatccacctgcctcggtctcccaaagtgttgggattaccagtgtgagctactgcacccggccatcaagtgcttatagtaatttttgtgaatttgcttgaaaagtactttttcatttttggtgctataatattgcctctttcaggcttcaaggggagatgtgttgaaatttgaaaaccaggtgtgcatctacctacgttgttctgcttttatagcctttgctgtcacagctcattttaaagtcctcattttgtccttaacatatacattcttatggagttgtctctttcccttctacttgaatcctttagatgaccttgtttggatccttttccacttctgctctttttctctttaagatgtggcacttagaccaatgcacactgatccagggccaagtgaatggtacttttgtaggaagatgagatcatgtttctgttaggtttccaaactttttcctaatgaccagaattttagccacaatttttggggaaggacatatccttcaggccaactctggctcatccatcatgactcagcttatggacctgcgcccaacccagcagaactgatcactccttcctttgagttctcagtggtcttctacctccgttggcacgagcctcactgtgctgcacttacctgttgatgtgtgtttcttcccatctaagttttgagtttctggagatcagggaaccttgtgctattcacctttgtatcaccacactttggcactgagccttgcacatgctgggtgcttaattaatatgaaaccagctgggagcagtggctcacacctgtaaacccagcactttgggaggccaaggctggtggatcacctgaggtcaggtgacagctggagatggaagctcttgtctgggtacccagagcttagaaatgttcccaccagttatcaagatctgttgaagactttctgaggaaggaactgaagacgcaggttggaaaggactccctgctgctgtgagactctggtttctttcctgtctattacaaatgccaccacaaactaagggattctccctgcagctccgtatagcccagccaagctttcctactctacacttgtgcctccagggaaagagaggcagagacctcatttctaagagaaccagcctcattttatttgaaagacaaaagaccatcatgaacacaatacagcagaatgctacctaaactccacaagttttgagtaaagaatcagcacagttatacattaagtttaactttcctatgaggaaagtttatttcagcccatcctttcacttctaccggggagataccttggcttaagagaaactgacctgaacactgaaagatcccatgaagtcacattttgttgcctcttctgactaagtctggtctaccctcatatgatcattataaattcacatttcttagaaagtatcctgggggtggaggcatgatgaaaatgcacagtacaaagaaatgtaggcaaatgagggtttaacttccagccacagatgtaaaaatctggcctcacaactaaatgcctaggtggtgacagggaagccacagagaaatgtagcatctctgtcattgctgtctctctccagactgcctagtcctggcagggggtgtgagatgcccatgttagtttcctagagctgctgtgacaaagccccatgaacttggtgacttgaagtaacagaaatatattatctcacatagaattccaaaatcaagatgttggcaggtgggggctatgctccctgtgaagcatttaggggaaaccttccttgcctttttctagcttctggtggttgctggtttagaaaacatgtcttaagccatccttggcttgtagatgtgtcactctaatcctccatcttctcatggagttctccttatgtgtctttacgtaggattccctgtctgcctgtctgcttatgagcctacatttctccttatgagaacaccagtcatactggattagggcccaccctaacaccctcattttaacttgattacatctgcaaagaattatttccaagtaaggtcacattctgagatgctagaggctgggactttaatatatctttcttgagggacacaaattcaacccataacaatgcctgtgactctcctatgatctcatattattctttgaacaggctttccgggtacagtcttttgttcttcctgtggaatattctattgattaaattgcctctttagttcttcagctatcagatgcttttctctggcaggccaatgtaattagggaactaataacggaatcaataaggaaaagagtatgttctttcatattttccagctgttccagtgattcatttagtcctcgctctgtgtttgttgctgctgaatttgtgcttgttaaaagatatgtggccatgacatacagtggaaagaagggaaaggagaggatctcgattggtctctggtaatgtccaggagggacatctttgctgggagagggtatcatgtggcaggatatggaagagaacatggcctcatttatgtaactgtataaacaaggaaagtttttaaagatgtttattgtttggaaaacacactttattttaatgttgcatgaaacatgttgagttgaagccatgcaggactgtataaacatcctgtgagctgatgcattgcctgtataaggaaggattcaacactaactgtgataatttctgggacattgtcctatttttggaaaattcaatattgctttatctaattccagtttcctcatgaaaaaaatagaactttaattcatggccttttaaaaggtagtttgagagataaatatacacatggtaattagaaatttactgtaacaaaaatataaatagaataaaatgtgggcttaagttactattgaaatataatacatatttattgttcaaacatctaaaaatgatggaaacttcaaaaatatataaattacccgtaatctcacaattcagaggcgaccactgctaaaattttggcatatttccttctgatatgtttcaagtttttgtaatactttaacatcgatatcaataaatgcatgttttataacatatttttaaattaataatgtcatgagaattttaatatccttaaataatcttctaaaacttactattaaatgttgacacatgtgttttatttctattttaatgttagacctataattttgtaatcacaaaagtaatatttatttataataatttaaagaaatctagaggacaaaaagaagaacatactaattgcccacagtcttgccattgcagagataactaatatcaataccaaggcctactttgcatggcattataattgcatgcatttctgtttccactgatcatggcatttttgacctttgtaacctcagctcttagttcagttcctagagcatagtagttgtttgatacacttttagtgactgaatgaataagtgattaaatgaagaagtagatgtgtaggtggagaggttttcaagatccaactcgtggtagaataaaatatgtttcagactcagcaacttactgcagattgagagacaaggtagctaactcaaagcccttaatgaataggagcctgctctttctgttcatctcaatcagcctccaggaggataattcaatttaattttttttccatcagtcaaactgaagagctgaaaaagcaaaaccagagataggcaaggtaggaggtgaaacaggcctgagtgaggagatcagcagtggctctctcgctctctttttttttttttttttttttttgagatggagtcttgctctgtcacccaggctggagtgcagtggtgtgatcttggctcactgcagcctccgcctcccaggttcaagcaattctcctgcctcagcctccccagtagctgggactacaagcacctgctgccatgcccagctaatttttgtatttttagtagagatggggtttcaccacgttggccaggatggtcttgatctcctgaccttgggatccacctgcctcagcctcccaaagtgctgggattataggcatgagccactgcacccaggttctcgctctctttatgttagaaagagcgtgagaggacaggaaccatgctgctctcaagggtgacccagcaagagctctgccaccaccaggtcgtccgtgatgaaactgatgatttctctgaggatggagactctaacagtgtcagtgtgaccctcatggtttttacctggcctgtttcaagtgtttgcagcagaggaagacacaatcatgttgggttttgttgaaagaatttggtactttgctatgtttggaatcagggctggcagattttgaactttgggttatagaaggttccatccaaagtctcttttatatgtaattggaaaacatgtcttaagtctaagcatctgtccctcaggtacctgtcataggaaggagagtgatccattttttaaaaccctacatgaaaaacttagtctttgcaataaaatatatggatatattcttcccaatgggatggtctggtccttaaaaacctgctgcttttccccacctctcaatataaatatacatacaagatatagaaatatccacaaatagatgggcagagggatagaaggagagacaggcagatggaaggacagacagacaaacagtgtccaccgcttttggccaacaacagtcatcatatcccttctttttcttaaaggtgctcgtagagctaacctcgaacactaggccatattggcacctttgctcctgttgtctcaaggcctggctcaaaacatatttttccaggaggtctcattgtttaatttctaccccggttaatctttcccatctgtcaacctctagagctttagcccttgccccaattttccctttgacatggtgtgtctgtaagtgtatatgaagatcagggagaagctactctgtttgcttcctaaacaattgaatgggttttgtgtactatgtaatttagtggttgtagagctttgtagtgttttattcaccaggttggtgaataaagaaagtgactagagggtggtaagatatttcttgcatgcataattgaacatatattgtagttagtacttactcatgtactgagagcccagtttagataaatactgtgagagttagtgtaaagtcagtgtggtatagcagaaacttgtgatcagccaaatcatgtatatattttctgtatagttgatgtagtcactatgcagcaccaagcatcagtaccttcatctataaaatgaatatgctaaatatatatatttagcatatataaatatatatatttgtatatatatttagcatattcattttatatacatttttagcatatatataagaaatatataaatatatatgtatgtatgtatatatatttatatatatatataaaatgggttcaagatcttttattttcagagcttgcaacagttggttagcaatgctagctaagctgatataatctgaaggccatccaacctttctctttaggcactcaaccagcagaatctctttcttgcaaacaggatcatagaccaattgggatctgtctccatgtgtgtgtgggaagaggtcctcttccccacacttttcccaacaaattgttttataaccaaatgcaactcaaacctataacacagctagtagtcagctgtatatacctgacaacattacaggctattttgaggattaaaaaaaatatatatatatatatacacacacatatatataactatatatatacatataactatatgtacatatataactatatatacatatatacctacatacatacatgtttaattatatgtgtgtatatatacatatataaaactgtctctactagacaaaaatagttttatggctccgttgttcaataaatatttgctgaattaaattgaaatgagtcaaaacttttctgagccccacaaaacttttttgagattaccggaagtttatacaaaaaattatttctgtatgagttgtaacattatcgacttagaactttccagatggcgaagttatccaactgtggtgtgctgggaagaacagccctataggagagcagatattggggatgtgatcacaggaatatacttcatgtggtccaatttctataaacttgatagccactctggcttcctcaatgctcccatctgtaaaagtttttgggaaaaacataaggatggtggaattctcatgataaacttgggtcatgattccatggaaggagacttgagccaggcatcagaaaactcaaatcctagtttctttgaccaagacttatcttctccaagattaagttttgttaattgtgaaataggaggtttatgttctcacctgttagaggtgtttatgttctcacatggcattgtaaaactactgatgcacaaaggtgactaaggcatgatccctgcccccttatgactcatagtctagcagggtagagacatgccaaccagcaatggattactatgaacagcttcttagaggcaggcagtgaatacagtggtggcaccgtggaagcttagtaactaactctgcctgggcagattgcagaatgcttaagagcagggatttaagttagtaataactgtcctaccttcctttcaggattgttgtaaggcttaaatgtatatgaaagaacaacatggtagaattattattattatcgttattattattattccattggcagttagaatcagatgttttacttctagactttcagttgaaaatatacccaatactcctagttagtcacttatagggatgctggcttatccctaaggtgttataaaggggtcagactctacattcaaaaagtaagtgaacatggaataataagaagagtggcctagccatcttgcaaaaacataggagtgtgaatgagcctggtctttttggtgacaatgaagagctccatttcatttagatgatctatagagcagtaagaaatgaaagtaaaagcatgatattttgcatgtaatattggctcatatatcagctgatgagcatttttatatgtagtcttatttttcctgggagcacagaatctgcctcttcttgtctacatgacaatggagacagtgatggccatcagaagtgtatttatactctcctcaaaagtatcagttgattggatgtatattgagaacccacgtaatgctagaagataccatgataagcagtcatattcctacctttttatctggataaaataaatgcctacttgggtgtgttgggcactctggtgttgggatgctgcagggaaaacatctgtattcatgcccagcagtggttccttgagacttacattctcacttcattgttttgcagctctacagctccatggactttggaagacggtggcaactcatgcatgaacgcatcacacccaacaggttttattggtaagccctatccacacactcattacttcttagataaagaattatcaaacagcgtagcactctagacagctctggacagttgcagttcttgcagacaaatgtgttccagtcctttgctacacagagtggtttgtagaatagcagcatcagcatcacctggggacttgttagaaatgcagaatctcaggccctattaagacttacgaaactgggatttgcatttaacatgatcctttgctgactcatgtgcacatgaaagtttgagaggcactgggcttaaagagctctgtgagaagggtcatgatcaggtgctctttgctatgtactaaccccctctttttggaaaagtgcatatattttatgtacatattctaaaaagcagtattttcccaaaatgtactctggagaacagcagttccacaaaatgcttcttctttcataagagtttctgtggtcaaataaattcaggttatgataattcaattttatactcctggaaactcaggattcatgttatgatattaaagactctggagaagtgctgaatgaagaattctgccaaacttgaagtcactgattcccaaacttatttcactacagaatccttttctcatgtcacatgtgataaatccttcagaactacctctgtagggcatattttgaaaaaccttttatgggaatgaatacatgtttcaaatggaatataagcccttcctcctaatcaggaagtgttttattaattagtattcctttatgcatgcatactatttttatcttggttgtaacaagttttgtacaaatttgccttttacacttgcttgctataacatgaaaatgattcttacttttatcttgctttcattttagcagaagtgatggctaaaggaagggagattaagaggcatacaccaaagtatatagcatgcttaattatatgcttaatgaaaaaaaaagatttggttaggcacagtggctcatgtctgtaatctcagtactttgagaggctgaggtgggaggattgcttgaggccaggagttcaagaccagcctggtcattatagtgataccctgtctctacaaataaataaaaaatgagctggccatcagtgtcatgcccctgtagtcccagctactcaggaggctgagatgcagtgatcacttgagctcaggagttcaaggctgcagtgtactctagcttgggtgacagagaataggctactgccatcatagagattaggccaccgtactctagcttgggtgacagagcgagactctgtctcaaaaaaaaatttttgttagaagttgtactcattccgtatctcttataaatatcttatgaacactcccttaaaaactcatgtgatagccgtttatgccttacacaacttagggatgtgctgtgtgtgtgttgaagatggtggtaacaaataccttgtacatacacacattcataccaacatctttggaagcaatggcttcaacccattccgtctgcatccacaaaactatgtttagattttaaatgaagattgcctaagcattctatgaaaaatcaactgtttttttttttgttttgttgttttgtgttgttttgttctttgtacatggttcggagtagttgtgagagaaaagggagttggcagtattgctcttgactcaacacctggactatctccagcatgtttgccccttacaggcctactattatttcatctgtagctgttattccaactattattttgcctgtatttggaactatggaggtttttcaatagactgaggcagaaaaaggaaatatttgtttttctgctatttcacttatagaactacagcctttactgagctgagatagtccagtttctcagtatgccaccactcagaagtccagaattcgaaaaaaaaaaaaaaaaaaaagaaagaaagaaagaaagcgaaagaaagagccctctgctgtttctggaacaaactcttgagatgataaggcagttggccaactagaaagtcaggttagtagaggaggaaagcacactgggctagatgaaccatgccactgtgtctgaatgaaattaagtgcctaagaagcaacattttcctatattttgcaaagagcaagaggagaaggttctagcttctgtcatccaccctcttcctttatgcagtaaaaaagaacgagtccctaggtcctgataattgtgttttgtctcttctccactctgtgcttcttcatatatgctcccaaggggaaatataacagtttatgcctgtgctgaatagtcaagtggtagttttgaatattcaatttttgtaattatcacttctccatttctgatatataattaccgcgattattcttttaggtgtcgtgtgagtcatggcaaaagagcttattttacatagacatttttttttaatccaaagacagaattcagggttttctaaagctctaaaccgcttatattgaagatatatgttttgtataggttagggatgtaaatattaacttgttatctccttgagaaaagacaaaatatgcatttctctgggtatagaacaaaccttggcttaagtgggacctctttaacctatggttccctcatccatctaatgggaacagtatttttgttgtcaatttcataaggttattgaaaggagcagatgtatcaagtggacacttggctatttcacttctccattgatttaagtactatgtttattactagtactcaagaacatgtcacataagtgaattgtcattttgctgggcacaaatgtgaatctcgtgtacggtaaggctggtgcccatgggcatgtgataacaactgaatgggtctgatttattgccaagaatccacatctcagctgaacattattgttctctactttttgttgagtcataattcttataattcttatgaagtgatcaaccaaagcaaaacaataacatgcatgaaaatgatttctttgggagagagggtgtagagggaagaggtattgagggtggttggggaacgctgagtggaaagcaggcatggtaaaaacaagacattgaaatgagagacgatgttaaaaagacttttaacttgtggtatgtagacaaatagagtgaacatgggattcagaagaaatattacaaataacaatatttgattgttgtgattcatagctttgctcctgtgaccctgcgcaaatattgttatttataagctgcacatttgcaagtgtctaaaggatagatccttcatgagtgtccggtttcttctcccatgctactcgcagttgttggcaagtagcagcttagagggggatttgtgcagaaggacactgtgctccagaagtgatttctgacgaggacacagcagaaagaacgaaccccgtgcatgtctctcgtctgttccgtcatctacagtgatgattgttgtaatggttgttagaatacattggaaattgtaaggagttatcattattatccgcttcttcattagtgccccacccttcttgtgggttaggcagagcacggaacataatattcattagcatcaatactaagagcttcacctggaaatatttttatgaattctggatgttctaatccaatcaagataggtcacctaggaatcttacaccgtggagtgactcagccatcaatctcaggctacaagaagaaagacaactgacatgaacattccttgtttatatgtgacccttccactcacttgatacctggtcaccaggtaatcaccagggctgtctaatgcttcccccacttttttaacctcagctgcttccgaaattgtaatttgcatggagagcagataaatggagtaagtgtccttaacatattcccttcattcttcctaggctctgctatggcagagttgttgtcatgggggaaaagcttttctgttttttttaatatttaaaaaaatatatcctactgagctacaaatgaatagtattccactcttcccttgggggatatttaacaggcaggcatattctgcagtgggaagattttttttttcctttgcacatccaatgtgaatacttgttgtgattcacagctttgctcctgtgactctgcactctcctaacatgctcagcctctttgggcatcttttccaatgaagtcacaggtgtgctaggccttccagaattctctgtgtaactagaatgacctcaaagtgcctctggtctctgatggcattcacttgtatggtatcctaaaacacggaaggaatgtctccaatgcgtcctctttactgatttccctcctccgctccttaattattctttctcttgaaagaattaggtcccttttttgtccctcttctttatcattgctgcaggaaattgtgctgataaagtaatgtactctaaggtatcaggaacttcaattcttaccccttttctgagatatttggattgcaacatggactggcttgagcattaggaaacctttaagaagacaacagacatactataagttctatatcaggccatgttaggcaatgcagggaatgtgtatcttgaagactgctgtatctgctatgatgcctggtttaggatgaaaagtggctggtgtgtaaaggtaggtaggttgggctgtaggtctttattgtactttgcttaaggccggcttacacactatgggtttctagtggtgtttgtgccagcagcttctcatctggtttttcagaaaggccatgagggaagggaggaagaatggaaaaacaaagtgtgtccctcctggtgtgtgtagacaagaggtcctagggaaatgccctttaaaagagacacatgaaaaaatgctcatcatcactggccatcagagaaatgcaaatcaaaaccacaatgagataccatctcacaccagttagaatggcgatcatgaaaaagtcaggaaacaacaggtgctagagaggatgtggagaaataggaacacttttacactgttggtgggactgtaaactagttcaaccattgtggaagtcagtgtggcgattcctcagggatctagaactagaaataccatttgacccagcaatcccattactgggtatatacccaaaggattataaatcatgctgctataaagacacatgcacatgtgtgtttattgcggcactattcacaatagcaaagacttggaaccaacccaaatgtccaacagggatagactggattaagaaaatgtggcacatatacaccatggaatactatgcagccataaaaaatgatgaattcatgtcctttgtagggacatggatgaagctggaaaccatcattctcagcaaactatcgcaaggacaaaaaaaccaaacaccgcatgttctcactcacaggtgggaattgaacaatgagaacacatggacacaggaaggggaacatcacacactggggcctgttgtggggtggggggaggggggagggatagcattaggagatatacctaatgttaaatgacgagttaatgggtgcagcacaccaacatggcacatgtatacatatgtaactaacctgcatgttgtgcacatgtaccctaaaacttaaagtataattaaaaaaaagagaaagtggtgataatgaaaaagaagacagactaaaaaccgtttcaagacagtctttcctttccaatctttcatgttcttagttttccaagtctctttttgtatgcatatgttcttttatatgtagcctaaatatatacatgtgagtgtgtataatctgcctttctcttcttaatgttctatccttacaatttttgtgtcattataaaatctttataaccatttttaatttgtgcaatatcttattacacaaagatacatgctttattctgttttattttttatcagacattgaaaattttcacatttttgatgatcataagtaatggttttattgacatttgtatgcataggtctttaacatcaagaattattttcttggaccagtgttttaggtagcccaagtaaagacttgactgcatttttttgcagtgtcacatttcaataataagaccccaattcaacactaaaagtatttcagcaaagtagctttttactgaaccttttcttgaagagggttacaaagaagcattacatcagccaacacacgagtcttcctaaaactcctctgttcatatctgtcctgaccatcatgggagttactttctcatcctctccttccctttcatggactctaaagctattctgtcagtgatttattgtccacagtccatccccttccagaactccccttacacccacacacttctccccaagtatcatagcttttcttatgtaaaacaatctaccctctctccttaaccctccatctatcaccctcacccatcccagaaattaaatgtaatatcccttaggtgcacattccttacaacatggaggagggagaattggtaatagttagggtttaatattagttaaggtttagtatttttggtttaatcactactataagaagaagtttatcatatcaaaatatacacattttgaagaataaaatcatgtcctttgcagcaaaatggatggagctagaggccataattctaagtgaattaacataggaacagaagaccaaatagcacatgttctcacttataagcaggagctaaaccttggatatggacataaaggtgggaacaatagacactggagactaccagaagggtgcgaggagggcaagggctgaataactacctattgggtactatgcttactacctgggttacaggttcagtcgtatctcaaatttcaacgtcacacaatatacctttgtaggaaacctgcacatgtacccattgattctaaagtaaaagttgacattaaaaataaatagaacactagaaaaactatatatgtgtatatgtgtatgtgtatatatatacatacacacacacacacacacacacacattttgaacatcttaaaacctgtcattcaaaatattacccaaactgtgttctgttgtatattcccacctgtaacatatggcagtatcagtctatttagttaatatttacttcttccttttgggagacagcctccaagtgggctccactgatctctgccttctggaaatcctgccagtctatggtgttctcttcttgagtatagactggattagtggcttgcttctagtgaatggaatatggcagaggtaacgagcttttttggggagtaggttaccaaaagacaatgttttcatcttgggtgcattctcatgcttacttgctcaaagcaagctaccatgttgttagctgccttattgagagccccatgtgtcaaggaatggagggagatctccagccaaaagccaatgagaaactaatggcctgacagcttagttctaatgcagaaatgaatcctatcagcagtcacatgagtgagttcaaaagcagatccttctccagtcaagccttcatatgagacttcagccctggcaaacactttgatagaagccttgtaagagacctcctcaggcagaggcacctagctgagttgtgcctggattcctgaccaacagaaacagtgagacaatacgtatttgttgtttttagctcctaagttttgtagtaatctgttacacagaattattaagagataaccaatatgcttttctctgatccttattctttgcttgtttattttataacataatgttctacttctgtctacacgtagcctcctgtctacatacaactacttctgtcttggactacttcctctgttttctcttcattgttatcaactttagatatttcattttgcccattgtttgggtgtgtccttgaaatagaaaattatcaccatgttctggtattcctgacacctatgcccagactctatgggatttgacagttgatcagcaaacctcagagccctatcctcaacctgagtgaggcttacttaatatcatgagattgcctgactttgttataccttattattttatagtttgatggcaggattgcattttctaagaatattgtttattgtaaatatctgtgtatgtacatatacacacacaaggcatgtatgtacatgctcatttagagaagtgttaatttcattggtacaaatacttcactagaagtactaatataaatcacattgtctggattttagacacccgtgtcagcctaatagcagctgtgggtggaggatgaagggcagagaagcaggaagtgaaaattggggatggttaccttgagataatgtggttggagtgaatactcttgcacctcttccctgaatttgagctctatagatctcacctgttctggaatatatcctataatttgcttcaaaagtgggctccttctattcatttaggaacttcttttgaccctggaccatggttcttaaagactcagctgccaagtcatttttaggctattcatatattatccatgacagagccagagttaaggaacagacagaatagcttgagatggcttcctggaaaatgaagatcttttcaaacaaagttaacattatgggctgaatttttgaagctgcctctaaatgtgcatctacgattttgcaaacacagtcatttgcaatctcaagtaatgggatttaggcatcaacctgatataagggatcagattttaaggctattgcaaaccagggtatgctacaaataatatttaattcagctctcctttacatttttaaaatggtacagcaatttaaaaatacattacatttaaaataatacatgcaaggtcaggaggggaaatgtgaaagctcagcttgcaagcagaaatcagtttctactttgctgatgggggctacccatgctgtatgtctggttgcatcttggctgtggaagagctgtcttaatgctaagactaaaatgcagtgttcatatggtgcacgtggtagttagccatggcactgagcaagacagaatggtcaactctttggaagaagtcaagacatgccggacccttgatgattatgctgagtacctgtgagttatgtgaggtaggaggcatatgtagctaatgacttctttgctatgaaaagtgggagtcatgtttggtcctgccttgggagatctgaaaagatttgtgtgcattaaacatggaattcaaagacagccacatccactcacctaatccagtgtagcaaaaattccatagtgcacatggcaacaccggaaacactgttgttttctctttctctggctttgtggccagtgattccttagttagaggcacatggcttccaaatacttattccacccagatgattatgcaaagggcatgagaaatactcatttcgctcagaaatagtgaaatctaactttattttcactcactgataataaacttgcagaggggagcaaactttacttttgtcacagtgggtgagatttcagggccttattgtctatgagggtggtgggtcagaaaaacccccacataaagagactttgactactgccatcttcctggaactcagattgccttcagtacttgcatgttacattaaaaaatggggagagttgaataggttggtggtgatgagttgttcacttccatgagcaggaataggagaattggagggctagggagaggcctagagagagaagaggtcaatgttgagctcggcgcccaaggagaaagtaccaaattgaaggcttggaggctgtttgaaatgcaggttggatacttggttgcacggaggagaaaccatcctttcttccctgttgaggaaatctgttattgttctgctccagtttggtctggggctgtgcattagtcagtgctggctgccaaaacaaaataccacagactggttccaggcttaagcaacagaaatttgcagttctggaatctggaagtgtgcgatcagggtgccagcatggttggtttctggtgagggccctcttccaggttgcagagggccaccttctggatgtatcatcccatggcagagagagagagggcaagctctctggtgcactttcttgtaagggcactaatcacattatgagagccccaccctcatccaaacctaatcacttcccaaaggccttatcttcagataccatcagtttggaggttagagcttcaacatattttttttttggagagatacaattcagtccatagcaggatgtaaaacagggaacaacttgggaaggaatgcaaaatttctagagacacttccaccaagaggtgtcctggagcagaagtggctaaggcttgtcggggaagtggagaggcaatgccagaaatacaaatgtattgtttaaaagacacagacacacactagccattttttttttctggttggaaacacaatatatctcataatcattcaagggaaggcaagaaaataaaaagaaaataattacctataattttactgcccagaaaatacctcttaaaaaatcaagtacgtcttcatagccttttttccctattataatatagtataattttaaacatatatttaaatatttttcattcagatcatattgttgataaaattttatatcttttaaaaatgaaattgaacattctcctgtgccatcctctactctttctaaacattttaaagcttgtattgaattatattctaatctatggatatataataaatgtaatcattcttttgttatttgatattgatcttctgaaattttactattaaagtaaacattataatgttgttttagaaacatttaagtaattatttgttcaaggtctgattattatgatttttttaggatagactaccaaactatatatataaaaatattgtcgtgtcaaatccaaagagtttacacctgtttccactacaactaaaataccatttcactataccacataaaaatttaatttaaagaagtagtccattttaatatgcaaaaatgggttttccttgttttaatttgcatttcttatcagaccagtgagtttagacatgctttcgtgtatttattaaccattgtattttcttttatgtgaccatctgtttttgtttcttcttcattatgggttctttatattgtctctcattttgtttcaatattataacgtttattctttggtttttaattgcattatgctttttagcatactttgtacttacaaaaatttatgttatcgaatctttcattttccctttataatgttttttattattttatgtttatcaaacacccatagcctgtgatcatgtaaatacaaactttttatttgaaatgcagccttattcaatcatatatattagatattagatatatataaaaggcataaaaatatttagtattttccaacaatatattttagaaatctcatattaatagttaactatttcatctagtgactatataacaatttaatcattttaataacttaataattttccataccaatggatatttttaagatttataggatttcttttttttttttaagtaaaatgaaatgcagtgaacatcttttcacttaattctgtgcccatattttggactggtttcctctgacggttttttacataagataaactctggtcagaggttaggagccctcgaggtctcaaggttggtggcatttcgcagctttcgttttactggattggtcagtcttctgtgccctgtggccagaacacattgtgtttaatcgtggtttataacacaatagagtgtctggctgggtaagtctcctctctgcaaaatacaaccaaataaaaccaaaatagaactcttctttttcaaaatattcttggcttattttacttattgattcatccaaatgaatttagaatcaccttgtcatgttttaaaatatcttcctccccataaagcaactaattagactattgattagaatcgcagccaagctatacattcatttgaaaataatggaatttttttcaatatccagttttgagtattggccacatggtttgtctctctttttattccattctgtgagttccttagtaaagttttcttcatattagctctacatgtttttaattaatgttattcctatgaatgttcagttttggtgctattgtaagtaaagacatgttgcacacagcatctctcttcagattggcatgactgaacagggtaaccttgagatacatacgtaatttgcctaaggacacatatagttgctagtcgatacccttaaattcttcagactacagagagaatatgctttataaacttcaagttattagaagagtgtgatgtgagtaaggataaacacctgcggggatatttgggatctaaataaaaagctctgcccttaatagttttatgtggcttttggcagttgcatttaacctttgtgaccagtgctccaccagtcagaaaggataccagatgctacatcctgcctttgcctcctggctgaatgtcattcttcttagcctggagcacagtaagtgcttaacaaataccagctataaaattaataataaaacagcttataataagaggagataattggaataaatgactatccttgttaatttggtagcaaatggcacatagcatcactttgaaactaagcaagttagaaagcatctgcactttttttcaacattcaaatcccattgcctcatagtcagagttcatatttctgacctgtttttccagcaatcagcatatggcttattattatacttgctaaaactactatttttagaggaaaaatatttctggcttgatgttaacaaaattaaataaaattcaaaagtcatcaaactaaagattgtgttgtatcagatcatatgtactttagcagatgtgatgcaaatgttgagacaaattcttgcatgtctcagagggaccatggccagaaatggaaagcaccaaaagagtattgaaggaagtattaggactgctcagaaggtaaaggtctcacatcatcctggtgttcccagaaaagggttcctggaggagataggatggaagaatcttgaagaatggtttgaattggcaagtaagaaagtgaaacagatccttctggaaggaagaacaattggatcaaagctgaggtcatatgtctggagagtagttagttagttgatccgctagaatagcgtttctcaacctctatgtttttgacattttgggctggataattgtcatttgcattctaagatgttgaccagatccctggtttctactcagtaagtgccttctgcacccctctagttgtgcagaatgttctctgaggcacaaaatattttgcccctcactcccagcaactctgttaggaaaaaaaagtttgtgtcgaggagcaatgagaaataaagcagggatatagaccagattcagattgtgaagcacctcacatgccagataagtggtttggacttgtctatcttggtaatagaggacattcatcttttgtgcaagagaatggcatgatattcatgttttatgaagatttattaacatttggcactttcttgtgatgcttaagtgcatttatatgccactctctgtcaatagatgagctactgacttatgacagatgcaaatcttctaaagcatcctgatctcaagttccattctctggtgaaaaattatacagttgtacactttaaatgcgtgtaccaaatgtacattttttgaaaccatacatttttgtttaattgaaaacagcattaaacatttttaaaaactaaactgaagataatcattttaacacaatactttcttcctttcttgctctcttttaagttttgtacacatgaaaataatttctcacaaaatttcagttagattgtatgactattttacatcttttaaaaaaacttacacctaacattaacagtttgctgcatatgtacatagtaatcataaggatcattttggtagtggcagaatattccactgaattgatatactctcatttatactaaagagttatagaaaagttagagtgggaagaaccatgagagattatgtggtctagtgatttctccaacagtgctcttggaagccttatgggtagtctgatgcattgcctaagggactacattaggtatagagaaggcttgggatgcttagtgatcaagttcttacacccttcatttttgctccagccagaagtactcagattcttaattagctttgtatattggacttctgtataagttttttttaatgacagaagaccattcattaaagaagcaaatgaaaatgtttagaaaatcattgatctagaatggtcttttcatttcacacaagctacatatgggtataacagtctccaggttgtctttccttagtgcccacaccaccctgaagtgtctaattccatagcgtagacactgcttgaatggttaaagtctttgctaaactacccaaaccattgttttaggaggatgccacctggtgacccattgctctatcagtgggctcaccctgatttggcaagaagaaaactggccacactcacatggacatgattttggcaagtttggtgctaatgcactggattggaagaaatagaccccttcatttacttggtggcgaatggcactgaggatcatccactctcaccctagcctgttttgttctcaaagagatgcctaaaatagattcttcaagcaattaggctttttcagctgtcagtgtattgcttgtcaaaggcactggccttcttcctgtatacatgtctgtatttctgaacgtagcgtattctaccatttcaatcctcattgcttacaaatacaatgagggacaaaattctcatttaggaatcctgaaatctttccaaatcaggacacgttctccccttttaggcatctcacctgcttctgctgtttgaaaagacaatctggatgatggattaggggcttgtcccacctcctctcatctccccgctggacagccatgtcatattccgacattctccaaccttttcccctaacagtgtgttgaagagagctgtcaagtaatttgggcagaactgtgcacaatggaggcagagagagatggaacccctgggggatcccagctctgcagacttagcattttggatggatgcaaggagactgaagcattgaaaaggtcagaccctggaaccagtctgatctataaaaggcaccacagtgtgcaataattgtcaatgagtgggctaaaagcactgggggatttaaaatgggatggccttgcgcttctccaagtgatactgggaatgagaggtctgagatcccatcctgcttcctaacatttcttaacattgctatcttcatttaacgagtgtcatggaaggatgtgacagtgaaatagaacaaatggagttgggttatatgattgttttccacttttaaagaaagggaaatttagaacatgagttacattattgagggaaacataccttcatccatttttttaaatgagatttgttaggatttttccagagctgaaagaaactcaacaggttagggagaagaaaacacttcatggactctgcagtgtaatggaaagagcattggagtaggagacaggacttctggttgctaattctactcctgccactgggcagccaggccttggggcactagtaggatttctctggctttctgcatcctcatctgtaaaattcaaaggggtgatgaccaagggagaaccggcagtgaatacctgaggtgcttgctaaaaatgcagactctagatagaaggaataaatgcaatgttcaatagaatagagtagaataactatacttaaaaaatatattgtacttgggtgagggatgccctaaatatcctcagtcactatgcatcatatacatgtaaaaattatgtaccccacaactttgcacaaataaaaagaaattttaaaaatgccgatagtttcttcggccccacctggaaatccctgctctggatctctggacctgggcctcaggaatctccatctgaacaagctctcctggcaatgcctttgtacactagattttgagaaccagaggaggtagttaagaggtcattttgaaaaccagggagacaaattagtggagtcccaggtgttcccctttgagtagtacaaactggttcccccttatcaaaaaccccctcttttctccaccgtgcttgaaatacacagtggaaagggttgttccaaccaatgaagacattggcacctccaggcatcttttcaaaatacatacactccctgctagatgagataatatacttccgtgtgctttgcaggctgcaaagaatctttaaaatgcttcataactgtaaaatgctatattgttttagactttattaaaataatgcctgtagtttttattaacattatgacatgaatgaggttactgattttatctatgcctgtttagatgtacttaggaattccattgaaaagacacttttgagtccctactctttgaacagtgtatacatagaaagggatatgaaggacggtaggtaggggttgttccaatttctgactctctctaaggtaataaattatgcattcaagcccattgccatgggactctcagtgtttttccactgtatgcagtgagaatttccccaatcccttggcttgggatcatccatgtgacttgctttggctgagtttagcaaatgtgacacaagcggaagctctgtcattgcactgtagctgtggcccctcaccccaggccccatcacgaacccacagagcaacctgagccttcccctctatgggatgccaagctctgctggattcatagcatgaagcagagcctcgcattgagcccagcctagaaaagctgatcccagctggccttagatgtaccagcaaaatacataactgttggtttaagctgctgaatgttgaggtagtttattatgcagcaaaagctaagctgatacagtaggacaaagacaagttgagacaactggacaaatggctgatacaaaggattgttaggtaccaggagacagatacagcctgtgatagaggtgtcagaggagtggcatcagtaatgtgttcatggaggagttggaatttgaggggggtttgaaagatggtttcaatttcaacaggcaagcttgtgtgcgtgcttgtggatcctctggcatggtgggtaatggcggacatttcagtcacaggaaggagaaagaagagaaacagaaaagcatgaggtgtgtttaggaaattgttagtaggtcagtctgtcaagaagttcggattctatgcttggagagagagagattggccgataagcctagaaaagaagattaaagtgataacttagaggctttaaatgccaggctaaagattttgcagttaatacagtgcacctttaaagggttccactcaggggcagagcatgctcaggactggtctttaggaagctcatttttacagcagggtgaagggcaaattacacaaggaagagctggggacgaggtggccaattaaaaggctattcattactgggggcagtgagtcctggaaagagaagatggaaatccagggaattctagaagatgtggtttgcaatttaaaaaagttaaaaagtctgggcgcggtggctcaaacctgtaatcctagcactttgggatgctgaggcaggcggatcacctaggtcaggagttcaagaccagcctgaccaacatggagaaaccccgtctctattaaaaatataaaattagctgggcatggtggcacatgcctataatcccagctactcgggagcctgagacaggagaatcccttcaacccgggaggcggaggttgtggtgagctgagatcacgccattgcactccagcctggccaacaagagtgaaactccgtcttaaaacaaaaaaaaaaaacaaacaaaaaagttaaaaacaatttaagtatagaaaataaattcaaattcgtttgcagtcttaaaatgtttcctgtaatgtgtaacatctagaaactagagttctacttggaaacaaattcacaagttatggtggccaccaatttatagactttacaaataattttttaaacaagggctcaaattcagcataatatttacacatttgttggaaagctgtgctctggacttaggtatcatttctcccagggtaagaaagcactgaagaaagttctctgagtagttttgtgtttgttttgtgggggtgaggtagggtgggagagatgttttaagtggtgttcctttttttttttttttttgaggtggagtctcgctctgtcacccaggctggagtgcagtggtgcaatcttggctcactacaagctccgcctcccaggttcatgccattcttctgcctcagcctcccaagtagctgagactacaggcgcctgccaccacacctggctaattttttgtatttcttagtagagacagggtttcaccgtgttagccaggatgctctcgatctcctgacctcgtgatccacctgcctcggccccccaaagtgcttggattaaaggcatgagtcactgcgcctggccccctttttttaaatagacctccaaatagagagtgggtgacagagcgagaccctatctcaaaaaaaaaaaaaaaaagttgtgttcaggaggtttaggagctctcaggaacaccaccacctttgaggaatgagggatatggcatgggtggagaaagaggctgcctgtgatacaggtgcagcagctgatcctatagcacttgtgtagctgggatggcccttcagaaatgtccagccttgaaccaaaggattgggtctttatatctccacagtgactggccatgagatgtgggctgccaccaggggaggggtgtgaccctaatgaggtggctgtcatcagctgcggaaaattcccagagagtgacccagctgagagccatgagccacccacacctcaacacttaggataaattcctgggacagagggggattcaggtggcatccacctttggagagagttatttatttcaaattcttgttattttcctaagaggcaagattaattttgataataatggtggtaaataacaatgaaataatacatgaatagcaataacaataagacattattgtttactgagggcttatgtgatgtcaagcaatgtgctaagtccacagcatgcattactgcacttatgtttttaagaagcatgcaggtggaataatgtagtggcccagtgtatggggttggccgcagactgtgtaggtttaaactgctaattagctgtgtgtcttgggcacccagggcctcagtttcttcattgaaaaaacggtattctaataacaacagcaatctgtctcctagggttgtggtgttatacgaatcagaaaatagtggagctggtttgtgagctagaaagtgggagaactgttctttctgggttcaaagcccatgttgtcaaatttaacttttggtgtttgtgggagggtagaccagagcaggtgccacgatagggacccggtgtagtgggagggtgttgagtatttcagcggttggagaggtcaaggttaaaagtgcagtgaaggacagaagggtaagaggcagaagggtgtggaagaccgtcaagctcacagtgtttacctgtctttcccagcaagggctagccccattataaaaagaacaaaacctaaagactcaaaacttcattcctttctgtactgaaccccacccttgattgtttgtccaaggaagtgcccagtttcttgactgtcctccatggcctggatcatgcttgtgaggcactttcatctagccccaccacagtgccaggctccatcagacaccttttggtggagatgatggtcttttaggctcagaaatctactctggttatataaggaggcttgtcacctcacgtatggttgctgaactaggaagtgggtggaacgaaagaaacagcagccgggggaagtgaccatgaagaaacttactgttgtatgtcattaatcgctaattgctgaatgattttattatatggcagccataaaatatcacttgaggttttacagcctgtgctagctttaagaaaacaattccttatgtcaaaatgactattaaattaactgattccatattaaacatcctatggactcccgatgatttatgaggctgtataatgactaagaatccttcctttctgctgctctcaggaaaccagcagccatttttggaacagctaccgaccttggcaacctgagagatgtgctggtttctaagacatctggacaattggagttaaaacactctcattttacagataaggaaactgagccccagggagataaagtgacttaaccagaatcactgtgtagacaaagtggccacactgtatctgttgtgctgatgttactaataattatttatttgtcctgttattcccagccatccctactgtctctctttaataaaaggcaaattgaatcttggaaaactcttttgtatataacttcaaatataatcacttgtgagataaggtgtgatgcctttcggtcacacctatttacatttgttgccctgaatttgcttttacatgtttttggtggaggtagacccagtaaattgactgacaataattgtttgggccttgcaaggtatttccaccagagcatttgcaccttcacacttggagcactgtggggatgctgaatagacaccagccatgtcccctccttcaaagagctcagaatccagccaggagacctgatcctcgggtgtcacatgctgtattgataaaagactattgaaagaagcctggagaagtagttagcctaaagttactgagctagagaaagctgaacaagtcagccagtagcctatgcagccagtcgcagctctgcggtgttcctgtagtcctctctatggtagcagctctgagcatgctgctagttccccatagtgcctgcagatggccccagagtgctgccggagcatgacttcaccactcattaattgattacttcaagcaacatttgttgaacatctgctaggagtcaggcactgaactaggcattaggaaacaatggtgggtgaaacagacaccgtctctgccctcttagcacttatggtgtagcaaggaaacaggaagaaatcaaataatcagacaattaaagttgtgattactaactgtggtaagagcaatttaagatgattaaaggttgccatggtgagtgtaaaaccaagggatctagtgtagactggaactccgaaaggccttccttaatcgtctgtgaattagtcagggctctccagagagagaaccaataggagatagatagatacaaagctggatggatgattgatagatagatatagatggatgagagggaatttattaggggaattggctcgtgcaattatagaggttgaaaggtaccccaataggtcttctgtaagctggagacccagggaagctgctggcatggctcagtccaagtccaacagtctcagaatcagtgaagctgagggtatgaatctcagtctgaggccgaaggcttgagaacctgggcggggggttgctggttgaagtccaggagtccaaagttcagagattctggagttctgatgttcaagggtgggagaagaagggtatctcagctttggggaagggagggagatagctgcagagaaggaggtagggaaggagataaaaagggagagagaaagaattcacctttcctctttttgttctctccaggcccccagcccactgagtgatgcctgcccatagtgagggcagatcttccccacccagtccactggctcacacgccaatctcctttggaaacaccctcacagatatacccagaaataatagtttaccaattctctaggtattccttagtccaatcaagttgacatgtaaaattaaacatcatagtgtatatatgacagggaaccggaacctaacctagtcagatatataaacatacttaacaaaactaaatcacgtagggtgcaggtaatgagtctttgttgggggtgggcatccatctctcttgatctgtgtgagtgaatatggggagattcagtcattgtggctgacatcagtagccctggttagtagcctaactgacctactaggaaatgatgtgcttgtggttaattgcctcctccttgtgcacttcagcttccttacctaaagggtgagaagtttgcaccagaatcatacctactcagtgtgtggtcaggaaactgggtgctggttcacaaactgctactagtctatgatgagataagtgcacagataagtatatctattgagagtgtggaaactcgtgtagcaatttgacattctttaatattttattgcatttacaaaaaaaaaatcagtctgggaaaatgaattcatcccaggtaacttgagaaccaactgcacacgacgacctctgagaacccttccagtgctaaaagccttatactctaattggatgggggtagaaacttctagatcagcattgtaaaatactcagtgtaagttctagaggctggagttgagtggttatgagtgagacgatgtgattttagaaagaacatgttcttagcctgggtctagaacacagaagtcataataccagcagagtcagaagttggtcattctaagaagacagccacaccatgtcatttactggcaatacacctaatctccaggctaaagcttaaaagaccagacctaacttggagcatttgtaaaagaggaagaagaaaaaagaaagaaaaatccaataaactcaaataaccaaatacatatatttgatgtttgttctttcctaatccatttaagtcccatcaaattgctcaaaagctcctttgatttataaatggaatttaggtagtgagtcatctaaaataaaaacgatttaaactttgaaaagtagctcccatgaagcagaataaaggtacttaaaggatttctatttcccaagaccctagaaataccatgaattggagtatctctgtttaactgctgttatggatggtcccttgggtaaacactgtgctttataaaaagctaatactcagaaagagtttttaaaaattaatattcatgcatgggctcatctggtggaaaaatgcatggttgacattttgtgaccacgttgcacaaaaggcctgcattaacagtaagaagcacgccttcccctgtcccatccctcctgaaatatttccctgtgaaccttgatttcttagctctctcttcttcaacattcagggcaggagcatctattctagacctgtgatcttactgggaaacagtagacttgaggaggcagagatgaacggggtgagaaagatctgggtttagaggttgagagttggttttggaaaagctgaacatgaatcaggaacaggctggggcacccccttcactggccacaaaaggctgctttttccttgccaggagcagagctggtgtggggtcttggatttgctgcctcacatttggattgttacatctagagaccttactgtatttgacactattgcctgccatgtgtgtgttaggcaccctcagcatgtcatgtcattctggaagaaagagaatcataatagcccagcaccagtcaagactgctcccttccactcttcttatttgattagccaagaagcctttgctctagctacctggtgttgttttctaattggcttcccctcctattcctcctatttggaggagtcaggctcctccaaatcatgaccatttctttactactcaccttagcccccagtccttcccttcatcttccttccaggaatcattgagccttctctctcaccaaaaaagtagagcctaaaagacgtaaatgtaccagctttcctttgcccctgaactgccctccagagttcttgctctttccccctatttctctgaggtgttggaagaatagctgtaccttctttatgaacttaaatttccaggtacacttttaatcttgtctcttcccagctgttaggggttttgcttcatccgttaactctctcttggttcactatcttcaaatttcttattctctgccactgaaaacctcattatttctcttccatcttgaaaaagagacaaaaagaaaccattccactgtgcatctatatttcaaaacatcatattatatatgataaatatgttcaactctatctgtcaatttaaaagaataaacaaggccaggcatggtggctcaagcctgtaatcccaacactttgggaggccaaggcaggcagatcacctgaggtcaggagttcaggaccagcctaaccaatatggtgaaaccccatgtctactaaaaatacaaaaattagccagatgtggtggcaggcgccggtattcccaggtactcaggaggttgagacaggagaattgcttgaactcgggaggcggaggttgcagtgagttgagagtgtgccactgcactcctgcctgggcgacagactgagactccgtctcaaataaataataaacctcaattttttccttttccactcaggtgactttcctgtttgcctccttttcttcattgctaaattgtatgaaattagttgtaatgaatgtgcttccttaccttcaaatcacctttaaacccactcccatctggttcctccaccactacttcctttactgcaaccatcaggcacctcctaatggccaaatcccatgctttcctttaatttctcatcctacttgacttcagcagatgttaacacggttgtctacttccttcaggagtctttgtccttccttgatcatgattttcttgtttttctttttaccttcctgaccatcctctgctgcatctttgcttgcttctcttgggttggagatcttatacatgtcagtgtttccaggatgctctcttcattgtttcatttgcttgcaaagagacacatttccccactctcatcaatgcttccagtccctctaaagattaccaaaccctatctcacaccctactctctccagaatttcagacacatacttctcatgcccctcgcaacatctctaccctgatatggctctaatactgccagatagctctactatatacctcaaaacccaactgtccataacagaacatattgccattccccaaatgtagaagaactgcatctcctcctttccccaacttggttaaatgagttctcctgatttctcagattattttagttaacaatatcgctatccatcaaattgtctgacctagaaatctcaaataactccagactgcctttattcactgcatcagtccctctgaacagcagggtccagccgctcacaccctcttggcccccttgttgaatttattacaccttcaaaccccttccctagatgcatctgctttttccctgttggcacttccttcagccaggtcctcctcttcttttgcctggaccagcttcctctctgtttctctgccttcagttttactgccaaaacttgagtcagtcctttatggcttcttcttgtttcctaaaacaccggctaaatgaggttatcatttggttaaaaacttctgctgctgaagtcgagagaattatttaaaaaaaattaaagcgtaatgacacattagtgagtcatgattccttgtgaagtgtgtcacaaaaattttgtggccagtaataaagaactgatgttgatgagttatcaccctcattttctttttgaaaatttgaggcaattcaaggttatcagtaaaatgatgtcattcttacatacttgcattcctaaatgaatagaaatcaatggaatgacaactaatgtgtcagcttctttaatatttcttactgaccatagtaagatgcctttatagatcataaagagatatattgaatgtaaatcattgtttttgctatgcaggatttcattaaagattatttgagatttgctcaaaatcagaatatgctcacctgattttcttacatgtgaacagcatctaccatagatcgttttggaaatcaagatagacaaaaactagtctcaatattatacaaatcctttagcatgacacagaatgccttctcataacaaatttctggaacatctttccaaactcatagtcatgtactatcctaatctctccacccataccccacaccaatcactgttatgcttacatgccataagattgtatgccttcaagtcttttggcaagccttccttttgccaggccaatgaaggcagggaatgcaattctaggcaaatccaggaaatccacttatcttgtaaagttctgctcaaaacttttgaaactccctgaaccctctctaacaccttttcactgtggccaagagcatgtttctgggacaaacctcttggcttctctattgaaagctctaatatttgggtcagattttctaagcttcagtttcctcatcagcctaatgtcgataataatgccatctacctcatagagttgctgtaaagatttcataagattattaaccatgcctagggagttcttctgcagctcttcctgagtttagatctgttaatatccgcaactccttcagacagtgcttggctctgccacgctcagctggagtcaacttcactttgcatctttctgaagcatctaatactgtggagtaaattaattttcagtgactttgatgttgtcccaaggtaattctctgtgatactttccagcagggagcctttgaaatgtcgtccctcttataattaatacattgtactgtgctgcacctatcaacagatggatttatcattacacattcagacttgacagaggtcagccatcatctctctccatgtgtccttgcatactcctggcaagttggtctctttcccttttttctttccaagtctcccccgccccgatcccaacctatcccccagtctagccagatccatagctttctggctgaaagtaattatgatatcaggctgaagttttgaggcttggaagggctctactgtgttcagatttcacttctgactggagtcagtgagctaccacattatcaaacatgtacatatactccttctaaataatggaggacataggaactgggcttctcccaatgtctcttctctccgctcctgagattgattcccgagttctgctccatttaaattccctcaaatgtaattaggaaaaaaggtatggacatttatcaatatcatcagcatctttacctttcatgtcttactagacctatatcatagttgaggaaactaaggttgagagtggttatcagtccaagttaattagtaggtggtacagccaggatccaatgcaggcttactctaaagctgagattttaattctgattttataccacctcggtgtctccagtgagtgtctccttcaaggctattttcagattcaccaccagggaggtttctggatcaagtagatctgaatcagatatatgtgacaacttcagagaaagggagaaatcctaggttctttctttgagaacagcttcccagcctgtgatcaaggaacctcacatcatctctttcaatggaaccaatgtcccagcccttttaagaactctacatggaagagagggagttcatattttctctacaaatcacaggaccctcccttgatagttaaataggatgatctcagcaaagctgacaagatgtttccatgtttgttaaacaagaaccatttgtttagctcaggagcatctgttgaataaacaagatatctgatgtgccatttgctcattgaaaattaacaaaccctttaaaaatggcaatttgtcaggagttatatgaagcagaattcattctcagcaagtgaacaaattgaaacttccttcccaggctttctagaatcccccagagccagttgtacagaaaaagtttagtttaatttgccatcattaaggaaaatatgcagacagtgatgggagaagagaagcaagtatcctgctagggaaattgaagagtcctgggagaggtattgtccagtccagttgggatgagctattccccttctgggctgtgtttccatttggagagtgtaggactcctggaagggatcagctttttcttctttcatcctgtttccaggaatcatgtggtataataaaactgtcatcagtcagcatcattcctctctgtgcctccccatggggagggaatcaaatggagggttaatttactccaagagtaaaggcaacaaagaaaagcataaaatgaatgaaaggctgtcactactctcatgtgatggaacagctattagaatcctggctaaaatgaagtctgtgtatagttctgttttcctcatgaagcacacgagcttcctggtattggtccatcttgacctgctccttggaggagtacagtgtgctggcaccaggtggactaagcatattgggcagtgaatctagcatttagtaagtccagataccgtgctaagcacattgctgacatcaattaaatgctcacaaagctctcgtttgttaaatttttttatttttattttttgtgggcttatagtaagtgtatatatttatggggcacgtgagatgttttgatacaggcatgcgatgtgaaataagcacattatagagaaaagggtatcgatcccgtcaagcatttatcctttgagttatgtacaatccagttatactccttaagttattttaaactttacaattagttattattgaccatagtcaccctgttgtgctatcaaatagtaggtcttatttattctttctaactatttttttgtacccacaaagctctcttttatccccatctatagatgaggaaacgaaggcttaagtttgtgtaatttttccaaagtcacacaggtagaaagacatagaaatgagatttaaactaatgcagcttgaaagctcattggttttattttcatgttgcatcacttcagatagcccttgaagatgcaaggttcctgggtctcttggtgtaaagactgagaagagcagcctctgaattcatgagcgctactttgggcagaagtatcagcattttaagcaggatattactgagattcctgggaagtgctggctggctggaggttgatatgctattcttgctgggttgcaattcaaattctttatttagagagagtttggcatgggaggtggtgagctctcggactttatataagcgggtccctgtgggctctaattagaagctaaggagttagctgactctgggctctgagcaacttgctgcctcatcttctcacgttagcccttttagcaattgatcttgtaaactttctgaatcagagaaattaaagatgaaaaagcgcctattaagtgatcttgccccagccccagactaggcagaatgactccaaagagaggattcctgagtgtctagttcattttaattttaattgtcccagagggtgtgacttcttgatcttcccctgagcagcccttcccaggctgatggatacaagcatgagcagtatctcacaggaggctaaccgctctgtgccagggctatgcgtgtgctatgcatgctcattttgccctgttttccagggcctagattttttcacatattgccactggaatgtgctggggcttaggaggaaaccttttctttctttctctctctctctttttttttttttttttttttttttttggtggtgaggaggtagattaaatagccttgtgtgtaaataggatctggcaattttgcctgtttccccccgtagccagatgatgtgtctacagcaggatttatgcaggcaaaatggggttgaggatacatgacaataattgggatcaaggactgatgatcccttgggaagaccacaaacactgatggcaggcacgtagtgagtactcctaagcctatgctaagggtgtcacagtattatctggtttaactttcaccataaccctgcgaggtaaatattgctgttattccctcttcagagacaaggattctgaggcccagagaggttggaagcatgtcaaggtcatatagctattgggtagtggggccaggatttaaacccagttctctctgtgtgaactacatactttaccctactatacggtgttactacctcataataaaatgtactgaacaaggtcacactgaggaagagacaggaaaggaccagtgatgattaattggagctggctgttgttcagatcagccaggtttagctttctacaccaggaagactgggcttgtgacatgagctctatgtgcaggttccaggtgcggagatcttgcagggggatttggatacctatgttcacttagattgtgaccccttccaggcctaggcgaaggggatatttcacccttgtttctcctgcttagagaatgacgctggacacagggtgttcagtctggtacacacgtagaggatctaactgattaatgctggtgtgctctgcagccccacccaagatgcccttgcttgttgctgaagatctttttatttattccacttctttccttgggctgtttttggctgtgggcttgggcctttccatgaggctactggtagttgattttagagcacagaatgttaggcagcaagggcagtcctaagtggggaactatcttcagttctggggcagggagtggaggcatgagcgtgggaggcatgggggtgagaagcatggagccactggatgtagaggtcagagggaagagttctgccaggggagctggtacctcggactgggtgggggtgtggcatcagaaaagaattactcgtgtcacagtttgttcccaggtggtcgctaaaggatttgtttgaaggaacagggaaccacagacgtttattttctttccctcagtgttttgtgatttcaggatgcagtttgatctgtgtgtgtgtaactgtccgagaagccatgaagtaaagggaagtctcctgaggttaggttgtggaatcatttcaatcctcccacttttcctctgctgcctgaggaatcttgggaaaatcacttaaactgtccttcagtaaagacctcattttccacattttcaacttgtgggaaatacatactttataggttacttcttcacattaaatgatataaagaaataaggtgcctgccacagagtaggtcattcatacatgccaggcattttctttgctctctttttgtcttgtccagacaagcctgcacggtgcatcaccagatgtgctgtggagccaagtccgtgtgagctgtgtttgaattgggagctgtcatttatcagctgcggtgacttagacaagtccctagctcatctgagtctctagtctctcattgataaaatgcagacaaacatagtacattccttgtcggaattttgatcatttgttcaacaatataattgagtgccagtttcgtgctaggaggtgaagttatcatggtgggcacagcagccaagattcctcccttcaagaaacgtgtagtctagaggggaggcaggcagtattcaaatcatgaattcagtgagataacacacacagagcattatgttgtcgcaggaacatgtctctcataagatagtgcacaaatctctagctatcgttacattacccttggggctactatggttattgtcttcttcctgggggtccccatatggttacaacctcttccctgttgtcttcccacttatactatgaacccgtaaagcagatgcccattttctaccattgattccaacctcagtctgggtctgggatagctgtaagtaaggctttcccaggaagtgggctgtcagtgtagactctggtcaggtctgtctacaccaatatcatgtaccaaaatgcatgcccctagcagtcccgaggcaaagactaggaaattctgattttattctcttcagagctgagatacaattaaaaatgttaccacagtaattggcaacatccattaacttgatgaaaattgcccaaggcagcacatttttcccccttctgcacattattagcctataaatacacctggttcctttttctttcttctccagaacttccacaaaacatcctcccatcctcccaagctgtctccttaatgccctttgcctttttataattaactccccgaattcctccagcacttccagtcagtaccacataatcttgcatctaattacatgtggcatggtggctcatctgagaggtagcatggaaagcccacattactgaaaggagagcactgactcagtcagcagagcccagggtgagtctcagctctgccttcacctggcttaggatcttaagtgactcagctttctgagtttgctcatctgtggaatgggagcaatgatgtctacctcctaagatgaaggctattaacattagataatgtgaacatgctctgtgaaataccaagtgctgggagctcctatgcattgatcccagcagctccttcatctgcccatgccctccctgttccatcctctggtccctgcttaggggtaggtgcaggtgggttctggcagcacagggatgttcacagaagccctctcctaatgggtgtggtccttgctgatggggagtgacaccttggggacctcaccagcaggaaattccttttccttttaatatacttgcttcattagtttccctataaagaaggggggcgagaaggggtggagcagaacaggaggctttctaacaatcaacagtgtaacagctgtcagtgcagaggggaaaatcataatgcccccttcctcctgagctgtggagtcactgaacaccagagaccacagagggaagggatccctagtctccttaaagctcccagccccagcaacctcttcaatttgcagaggaagagactgtacccaaagagatcagtaacttagtcaaaactacacagctggtcagtatgaacgtggtcagaatcaaggtctttataccagtccagtgctctttccattacgttccaacacaagtttttattagtcactttctacataatcaggaagtgtggaaatgagtgtgtgtgcacatgtgtgcctgtgtgtctctgtatgttccataaagtgcttggaacctggtgtacatgttcattaatgtgttcttgcatcatttcatttcatcatttccaagaccaaatcaggaagatttttgattgttatatcaatttgaaggttcagagaggttaactataacttgcccaaggtaacacaattaataaatgtagagttgagattagaatctaggacctatgataccaaagctcctctctgaaccactggactatagaagagacgaacttttgtctaaaaatgcacgtgagttagaaatgatgcccagtgtgtaagtgaaatctccacaagtaccctgttatcctgagcttgagactgagaattgcagggcggtgagatttttgttcattcctaattgttttcctttaagtcgtctctatggcctttataaacctgtttctctctcaacttgcatactctccactttaccaaccccaccatccaccctggcctcctgaccttcacatcatcactggactccatgctgggtgcacaggcagccctcgggaagtacttgctttaggagacacagggccaactggtgggccagcaggacgatttgtgcctcatgtagatgttcctctcttttatacccacttttgaagccccaaccctttgtggaactgttcgttggagctatgctaggctgtaactcacacatatgctgtaaacaaatgggccatgtggtaggctgtgtaacagttcccagagtgcttacacacagtaggtattcagtaggtatttgccaagcgactgtttgtcctattcctagtagagcagttgtccagctgtctttaggtaaattttcgtggattttcactactttaacacaatcataaaatcccagggaccaaatctccatttaaaatggctactgccagcatatgacatggtggtggctacagttcactgagattctttaatcaaattgaatttctctacccgtggggattggcctcttgacatgcatatgctttgccctgaaaatatttcatgtggctgctgcatttggttccagccatatagaatgtataaagatatcagattaaattagaccatatagttttccacccttccttctttcctagtaggaattgtgtcatatttgtgacccaatataaacttatgtgtttttatcatgtaagcaaaagttacatgaaaagtacttagtctaccacatgagatgcactctaatattttctattccagtctcttctattttatgaaacattatttgtgttgtgattcactaagtgtatttcatgacccactaataagtcccaaccctatggtttgaagaacactaatctaggcagtgaactttttaatttgctggggaaaccagaaggatgaaggggcaataactatccaggtgtcattaagatcgtgcatattctgagcaacttcctagggggtgtatcggtaatgactctctggttgcacgaaactgactaaattaaacacacacacacacacacacacacacacacacacacacacacacagagggatggtattaggatccaagtaataaatacatatagttagactttaggcagaaccctatcctaggacctcacagagtgatctctttttgtctcttgtctctgcttcgctcttctatctggaagaccagcttaagatatccaagactaattgcttcaagtctcatgttatggtctcgtaaaccaatcctaatgtctgggaaaagaattctttgatgcagcttggtgtgtgggtgtagcctgatctactcagctgttgacaagaggcaggacctcatggtacagacatgggtgtcagtgtctgcacctaaaaatctgtgaatctggggctagggagcagttgacagaggcagggggaatatctataatttgggaggaaatcttccaaagtgcccacgagagaagccgtgttcatttgagctggatgagatccctgagttcttgctgccctagcgttttcacaggacgatcacatttgtcaagcaaatcacagatgactgtgtttgacagctccaatattgctttgaggataaatggtgaaaatagcagcataataatataaaatgaagactttattcagttaattgcctagagattaattaaatgaatgaaatctgtttcaccatattatgggactcttttcaacatttatcctaaacatactgctggggttattgttcccattcatgtatttattcagctacttaacagatatttaagaaatgcacagggaggcacggtgctaggcactagaagaaaatgcaatttagtcagatctagagcctgtctttaagaagaatgaaatcaagaaggagacaaaaatcaggtgtacaaataactaaaggtggcgtgagatagactatgcttgaatccaggctccatctctctttctcactctgtgtcaatagttacacaactggaaatttcaaaatctccatttcctcatctgaaaaaaaagaaaaaaagattatattactatctcaaagtttgtttaaagattgaggtcatatatctaaattaatagtaaaattcttggtacgttaaaggtgttctataaatattagttgcacttacgatattttgagcactatcatactaagtgttacatactgcaaagtgttaacatgtgcctctctttcttccaaatgttttacatacatttaatcaattagttctcataaaaacaatgacaagggtgccattattacctccccattgtgccgatgaaaaaatttgaggcatagaaaagttaagcaaattgcctagaatcccccagtgactgagtgatggagccaagactctaacccagggtctggctctggaatttatgctctgagctgcattagtgatctgtgaaaaggagcacctgttacagtctgagattgtatcttgggctctaataaatgattctcagctctgacttcacattcctatcacccaagagcatctaaaagctattgattcctggacttgactcctggttaatgattctcaaagtgtgaatcttgaccatcatcatcatgtcatctatgtatttcttaaaattcttgggccccacccagacctccagaatcagaaactctgagggtggagcccagcatcggtgttccaacaagcccaccagaagattctgatgctagctgctacaatcagaatcagaatgagaggactattgctccagaccaattactccaggatttctggaagtagggcctatgcatttgtatttaatatttttggaaagttcctcaagtgatactaatattcagcccgggtcatgagctttcacagaagctaaatattgagctgggccataagcagggaatatgtagagtggactagaatgaatatttcaggtggaaaggcagcttgaacaaagacataaaggaggagaaagtttgtgatgtgaattggggaaatatcttgagatacggcagggtgatgatagtcaatagtaacatattgtatatttcttttttaattggtctcaatgtgcctttatttttttaaacttttatgtttggttcaggggtacatgtgcagggttgttttataggtaaactcatgtcatgggggtttgatgtacagattattttgtcactcagatactaagccgagtaccctatagttatattttctgctcctctccttcctcccactctccaccctctggtaggccccagtgtttgttgttcccctctttgtgtcatttagctcccacttagaagtgagaacatgtggcatttgtttttctgttgttgcattagtttgctaagaagaattacctctagctccatccatgttcttgcaaaggacctgatcttgttcttttttatggctgcatggtgtaccatggtgtatatgtaccatattttctttatccagtctcccattgatgggcatttaggttgattccatatctttgctattgtgaatagtgctgcaatgaacattcacgcgcatgtgtctttatgatagaatgatttatattcctttgggtatatacccacaaattggattactgtttcaaaaggtagttctgtttctagctctttgaggaatcaccacactacttcccacagcagctgaactaatttacactcataccaacgtgcataggtattctattttcacctcaacctcaccagcatctattattttttgactttttaataatcatcattctgactggcatgagatggtatctcacagtggttctgatttgcatttctctaatgatcaatgatgttgagctgtttttcatatgcttgctggccacatatatatcttcttttgaaaagtatctgttcatgtcttttgcccactttttaatgtttttttttcttgtaaatttaagttccttgtagatgctggacttttgtcagatgcatagtttgcaaatattttctcccattctgtaggttgtctgtttattctattgatagattttttgctgtgcagaagctctttagtttaattagattccatttgtcattttctgcttttgttgcaattgcttttggcatcttcattgtgaaatcttccagttcctatgtccagaattatatttcctagattgtcttccaggatttttttttatagttttgggttttacatttaagtctttaatccatcttgagttgatttttgtgtatgatataaggaaggggtccagtttcaatcttctgcatttggctagccagttatcccagcaccaaaacagcatgatactggtacaaaaacagacatagaccaatgaaacagaatagagagcatggaaatgaggccacacatctacaactacctgatcttcaatgaagctgacaaaaacaagcattgggaaaaggactccctgttcaacaaatggtgtattgtatatttcaaaattataaagtatatttcaaatttatttaccacaaaagatgacaaataaatgaggtaatggatatgttaattaacttgacttaatcattctacagcatatacatacagtatatcaaaacttcacattgtaccccgtaaatgtatacaactatgatttgtcggttaaaataatattaataaaattatcatttttaaatttaaaatctagctaatcagtttataaagcattcatactttgaccttatcagtattttacccttaatatttccctcatgcataccccaatattcagtgtttttaattcctggggaagtttttgccctggaaataatactcacaaagaagaaaaacacaaaggatcttggtcctgccacccccttccaagaccaagagctaagtgtgttatgaagaggctggtactaatgttccaagttggattctagggccactgacacaagctctagctgtgtctttgcaaagggttggtttctggtctatggcatgaatggggttggacaggattgtgatgtttctgaggttgtagcgtccagctctcttgaggactgtcgtggctgggtgagcggttatggttcccaagaagttcctgtctgacctattttatatggtaggatttggagactgtttgcacaaagggttaagttgctaaaaataagtttgaagccacttgaccttttctggcacttctgttagtagcacctgtgagtctgtggttctaggagctgattccatttcttccctggagttttggctgtggcttcctatttccttttgttccctgcatcctttcttggtctttggtcagaactcagaagggctcccaattatggagattttcagatgattcttatgctattattgagctcattaattgttatccaattaatgacaataccctcaggaaggcgaacaatctacaaggtaaacatgacatgggacacaggcaggaaagtgagacctctttaggccataagacagtttgtctttgagatgcaaacaccatgcttatgaagtttatctaacagaatgaaagtattataaccgttcattcaacaaatatttactgatgatctaccatgtgccaagtgctataataggatcaattgatacactatccagtgaaagcctgtgaggtcaagcattgtgtctaataaggaggaataaaggtaatttcaactcagtacaaagatttctccactggggaggagaccagattgttacaggagccttgtgaagagttggttccaaggatttgtgatgtacactcaatctagagagggagaaggtgcctaaactgaacttcttagtagcaggggcttcttatatctagtgccttgaaaaacactaccattactagttacttaacaaatgtagaagtatcagtcggggagctgggggaagaagacaggcaggaaagtatattagtttatccgtccttcaaatagaaaataatattgtcatagctaaaatgtaacgactgcattatatgtgtcagacactgttctcaaggattactacttagctcattttaattcttctaactctatgaagtaggtattatgaacttccattttatagatgtggaaactaaaaatcattatttgcacacatgtgatgaagagtttacacagagggcctgatcctagttcccttcttgaagaagactggaaaaatctactggaaaacgttagtttttccccagtcattaatgttagtcttcagaaaatccctgtggtagaattcatgattgagtaatttttttaaattatttatttatttttagacagagtctcaccctgtcacccaggctggagtgcaatggtgcgatcttggctcactgcaacccctgcctccgaggttcaagtgattctcctgcctcagcctcctgagtagctgggattacatgtacacaccaccacacccggctaattttgtatttttagtagagacagggtttcatcatgttggtcaggctggtctcaaactcctgacctcgtgatctgcccgccttggcctcccaaagtgctcccaaagtgctgggattacaggcatgagccaccacgcccggcctatgaactttttaaatgttcataggattttcataaattcatacctgatcttcacatatttattttgtcctataaaattttgttttatagtcatttaattaaaagtaggaatacagcatactcaaataaaggcattattgattacttgtttacattagcaataataatatatactgaaacaatttatctttactatctgatgctttctagaaactttctaggagttttttttttcaggcagttttaataggatgcttgaaaattcatctttactcttttgcagacattaagcacagggagctttatgtgtcctgaggctagttctgcactgaatactgctcatggccttctggtctatcctggcctaaatttggtcctagaaatgtgaaggaacttggatgcttgagagggaagaggtgccaggggcaattattaacctgcttggcatatctgagcaggcatgcctctcctcccctccctaatacctgtggcaatgtcacggaccctcttacacatgcctcacctcattctatcatcacagacctcaaaaaagtgaagcccaagccccaagttttcttttcttcagccatgtttaatccttcttaaggtttctttgcaaaaatcttcagtcactactcctctactgttggcccaacctcctttttctattctcaacttttccttcttaccaattaccttcaatatgagtgacttccagttcatgtagtctagaaccaaaattttctgcaatattgaaaatgtatacagaatgcattcgtatttcctaaatgctgctttaaagggacttacatgttggagaaagggaggcaatgaggcatgatgtttatgattcttactctaggagagatggatgggcacaaatcccattcttttcgccagctaggagaggcagcttacaggagaagttaagcttatggctcaaagccacctgcctggtttgagtctgagttttgttgcttcgtggctacatgtctttgggcaagttgtttaagctcttatgactaattgtgcctttttaagtagagaaaaaatcattcctaactcatagagttgatgagaggattaaacaaaatcaacatttacattttaaatatagctaacacatagtgtactctcaatatcaatgaattgttattatgtgatattctcattttactgaagagaaaaattagataaatgataccttccttaaaagttcattttgaggattaatgaagataatgcttataaacaccaaacacaatgcctgacacaggaatggtctcaatacccattagcatttattaccattattatatatactttcccaaacatttccacaagtttaacccttatgatttccacttttccttaaagaagaaaactctgaatgtttgcatcatgtatttctttgcttggtgtatttgtgtgtacttcccttgcactgagtttctacaagtggagacttgggactttaagacgagggacctgattgcttacacccaatgaatgtcagatagtttcctggtgagttgttatggttctaaataacaataagttcatgggcttctcagcagtttgtgttaggtgaggaagtgcagttcttgaatgcctatttgtgctgccttgttactaggggaggcgcagagtgcaagcagcaattaagcgtgtccagctaaggcagtgctgcttcttctttttttttttttttgagatggagtctcgctctgtcgcccaggctgaagtgcagtggcgccatctcggctcactacaagctccacctcccgggttcacgccattctcctgccttagcctcccgagtagctgggactacaggcgcccaccaccatgcctggctgtttttgtatttttttagtagagacggggtttcaccatgttagccaggatggtctcgatctcctgacctcgtgatccgcccgactcggcctcccaaagtgctgggattacaggcgtgagccaccgcgcccggccaaggcagtgcttcttaactgggtgtgattctgccacccatccccaccaggcgatatttagcagtccctagagacatttttggttgccacaactgtgtgagagtgttactgcatctggtagaggccagggatgctgctgaatattctggaatgagtaggacatcttccacaacaaagaattatccagctcaaaatgtcaacagtgccaacattgaaaagccctaggctaacgccatcaacatggcagaaggtgggcggcggcttccctctgtgggctggaggagggcctcaggccacagctcagattgtggtgaagaatgttcttcctaccctcagcagccaagttattttactatacctctggccagctgagcagcttcatttcctcccctgtggacctagggacagagcagttttgaagtacaaatctcttacccctatcatttcatccaaaggggagcctaatcctgagcagtgctggagctcaggagaaatattgaagaaagataattagggtctctggccttaggaagtttactgtctggtgagttgcatatatttataaaaatcattctatttctaattgatagcttaagcaaataaatatacacacaccttcacaaacaaaggcaccctatgggcttgtatgtatcaagaaactgcaaacctgagatggaactaagaaatggattcagatttaaggacctttagctgtgtctagtggtctgtctgtctcttagagcatttccctgtttgtgtgaacctctgactctctgattctctagatgtatgtgtgtgtgggaggggagggtggtgaatgtgtgtgaagctgcacacatgtgcatgaactgtctctgtctctctctgtttctttctctatctctgtgtgtttctgtttctctctgtcttttggctattgtcttcatattaccacctctctctctatttctctgtcacactgtcaattttttttttctctctgtatatgtacatcgtttttatagacctgatattcctatcaggcaaggaatatttctcctggtgacaagatttgagagacaattctttcctaacagcttcagtaagagaaatcttgaggatgtcttctaagttgtgatcacctgatcaccatagccaagatgtctcatgaccctactggatcacgtgacattccagggcttcagaggcatgggctgctgtgattgaccagcctggccaaaagcacatagctggagtcaggtagacagctccataaaggatgacaggaaagggtactgagcagacccaaaccacaggtgtccactctagtgagccaagagcaactcaagagaacaacttaataatgcaagtgctggaggatgtgtgatctacattctgggttctctagaagtataaaggagagagatcagtgtgagctggtgacgagggaaggcttccaggaggacttgattcttgctttcaaccttgaaagatgtgtgagattttaactaggtggaaggaagtaagccttcctgatgagggaagagtttctttgcatgttttattggtttggttgccttgttttaagctcccaagaggcagagacttttctttctttttagtatagcatagtatttattgaccacaatcaggcttcgtcagtatggtgccaattctctgaatgctactctgccagtgaccttagggagagaatggaagaataataactgagaaacttctaatcctgagagtaccagcatgatataaagaaacagggagttgcttgtagattcttgatattagacctttgtcagatggatagattgcagaatttttctcccgttctgtaggttgcctgttcactctgatgatagtttcttttgctgcgtagaagctctttaggttaattagatcccatttgtcaatttgggcttttgttgcaattgcttttggtgttttagtcatgaagtctttgcccatgcctatgtcctggcccatgcctatgtcctgaatggtattgcttagactttcttctagggtttttatggttttaggttttatgtttaagtctttaatccatcttgagttaatttttgtataaggtgtaaggaaggggttcagtttctgttttctgcatgtggctcgcctgttttcccagcacaatttattaaatagggaatcctttctcattgcttgtttttgtcaggtttgttgaagatcagatggatgtagatgtgtggtattatttctgaggcctctcttctgttccattgttctatatatctgtttaggtaccagtagcatgttgtttggttactgtagccttgtagtatggtttgaagtcaggtatacctatgtaacaaacctgcgcattctgcacctgtatctcagaacttaaagtaaaaattctaaaaatattacagtggtcagatatatttgggatacattgggttaacaaaatgagacatttctcttctgggaaaaaaaaaaaaagaaagaaagaaaccgggtggcttcagaacaaataaagtatccatatagtcccttgtggtaccctcagtcctctgcgtgtctggcctcaagtgttttacattgaaattttggcattaacacaggtagatcagattgtttattaattcagtaaacacttcagtatcacctaatatgtactacacacataggtcccaatggttcaaaaataaataagacaggatcccactttaaagtttatatccaaatagagaagacacagaaatgaattagcaattgcatacatgatttgattgtgctgtgcaaagcagtggtcctcaaacatggctgcacatggaaatcacctgcgacctttaaaaaatactgacaccttggtcccatctgtgaaagtttttatttcattggtctggcgaagaggacacaggcatctgtatatttcagagttacctcccagggctgtcattagcagtaaagtctgagaaccactgggataaggatgctttgggagcagggaaagggctctgcagtgatactagggaaggaaggactgctggaggggcaaggcccagtgagcttggaaagaggaatgagagttcactagggaaggagaggggcagggagatgagtggataaggacgttggagctcttcctgctggaagtcaggaagtctttctaattttggcctagtccctgtgtggccttaggcagacatccatttttttctgtgcctcaatttctccttcagtcaaacatgactaatgatgcctgctttccttaccttaggggtctgctgttaggataaaatgaggtaaagaaaaaggaaacgatagaatgtcaatgatcactgggaaaaataacccattagagtaaagcctcatttattcagcctctttggggaaagaagtgttttacataaatgaactttcagatgactaaatttcgacctttcaagaagtaataattttattttaaccaataaaaatcattttagtttttctaaaacataccacttgctgccgaagtaataattttattttaaccaataaaaatcattttagtttttctaaaacataccacttgcagccttaatttcttaaacagagtaccctggatgccatcagcccctgtttcttttcttctgtgccttcagccccgcaacatagatgtcagcactgaactgtgctgtgttacagtaatgcccccagggctgttgagaagtgtagggatttgtggcatggaagattgggttttgagttcttaggtctgtttttcataagttttccatttctcttgctatccaagtatcagctcttgggtctcaccattttcaattctactttccatttctaacttgctgctgcttctctgctgaagactggaaaaccagaatacaaatcttagaatagtgtataaactctgagtcattagactataagtaagagcttgccagagagagtggattgtgtgatctttagtaaatgagtttttaatgtgtgtgtcagctcttttcagtggactttttgggccttactctggcctaggtctctaatttaggagacagctgactgggctttatgtgtggaaggtcagaggtccacgaggattgtttgtagggattctcaggcctccatcttctaggtgttggccagagagacctttaaggttttccatctttctcaccaggagaattttgtccgtgtcagaccagattttgaatgtctattgccaaacttctgttattttcaaggcaggaataaagaaggagacctaggattaaactcaggaaggaaggaatatcttgaagcaaacagcccaaactgaggcaataccgtgttccccatcgggtagaacaggcaggtaaagtgggagggcagaggaggaggaagtggtggaaggagtcaagaaagttaagacagaggagatagatggaagacactggggaagggagaacttctgggaaggtgcaagatggagaaggccaggagcaaggtgtagaccagcatgactatgcactctgtattcttctctattttctttgaatcgttgacttattgaccattcagtactcatgtctcatgacccttacagatgacagttccttggagcagccacactgtggggactgccagtggccacattctgctggttcccatactgcaggatggtcctctttgagaaaatggatttctgagtagcagttggccctgagtgcatcccactttgctgtctgctatcggtgttgtcactgagcttctgtctctcccttcctttcccaggtcggtggccggattggataaggaggcggacctggtgcacatggaggtgcggaccacggatggatgtgagttctgctacagccaggctaggcccagggagatctgcctgcaggtctctgtcctcccccaatttgcattttaatatcttgggaagatgaaaagctctgagctccattacagccacatccatccttaattcccagagtaagggtgagaagtcctttcctaagggagacttttcattgaaacaaactcttgggaatgaattgtctggggatatgagttaatgcaatgaattttgaggctcctgtttgtaatttctttggcatcttcagagtaatttgaagaggaatgtccataactcatcatggtattttacattcacatggcgaattgcaagggctgcctgcttcaaagtatgaaccctttatataggcaaccttaccaaaaaatgtaatggggcattatttgcaaaactgtttattcatccattcgagatatttagggatggcctgctaagtgtcagacataattttaagccctagagagagagaaagtgatgagcaagttctatactatccctacaaacaagggactcttctagcagtgaaatttcaggattttaaacacatgacccgctgtgtaccttgttcagctgtgtacttcttacacaaaattggactgaaaaagcatcattttgtaacaatttaagcattttattcttctcagagttgtttatacttaaagggctcttctccatccaggaaaaataaaatcagcttaaacaaaaatatataaaaatataattagcatagattgagaacagagccaaataatctactagtggtgaggcagaggtgcagcagaacaagcacctgtctgtgagttggggtactcggctctgttaccctctggccttgataccaggaaaaactccttaacctctctgggctgtaactccctctgtgacctgagaatactcatccttgcccggagcacctcccaggattataggttaatcaaatagaagatgaatattagagaaactgaaaaatgttgtataaatggaaggcgattctgttttgacctggctgttggcattgtggtatcgttcagagtttaagtaaaactgcatgtgctttctgcaggagaaatctactgttggaggccaaccgtagatgcatgccagaaatgtgcatttgggggaatatgttttatatgatttatttttatttttaaaagagttagaaggtaatcagaatttgttactatatttctgccactctgtactcctccctccctccttccttccctccctcctgtcctccctccctttttccctccctccctccttccctccttcctttccttgccccttcccttcccttcccttcctttcctccttccttcatccctccttccttccttccctccttccttccttccctccttccttccttccctccttccttccttccctccttccttccttccctccttccttccttgcttccttccttccttccctccttccttccttccctccttccttccttgcttccttccttcgttccttccttccttcctccctccctccctccttccctccttccttccttccctccttccttccttccttccttccttccctccttccttccttccttcgttccttccttcctccctccctccctccttccctccttccttccttccctccttccttccttgcttccttccttcgttccttccttccttcctccctccctccctccttccctccttccttcccttcctccttccttacttttcatctcattggatccttaaatagatgtaaatcggtgagacagccagggatgacctacactctttttaatgtattttttaactgaagagctattgggaatttaagaagatactgtcacacacttaaattactgatcataagggtggtggagcctggattcaaaattatattatccaattcttatggctgagaaagaaactgggagaagaatgagatgtaggggtttcagggagcatagaaggacaggaggaggacagcaaatagccagtctcagaaaatgacccacaggccagttttcaggacaactctcgcatgggttttgcctcctaagtcaacctgtttaggccatatttgtgatctgtcatggtcatggtatttcagagttggaggatggtctgagttctgacctggtgtaggaatcccttctcccaaaactctaacagtacattctcaggcttcgtgagctcaggcttaagacacattattttctgatgctggacagcttctttaaaaaaatgtagtttcttacattaagctaaaatttattttatgaaagttcaagaattctggtccaaattgggatgaggcctatggtgcaggacttccgtgaaattttatgagattacaaatgcaaaacacttagaacagtttctggcctattgccagaattcaataattgaataaaggcaggcagaaatataacagagataaatgtcttgtgctgtacttaggttaaagtatagaatatattagttctgttccatcttctaggttttttattttattttattttttcattataaatcctccactggaattctagggtttttaaaatcaatttttaatagctaaaataatgctttttcaatctagtaaattgtccctaactcaactttatttagaaagtacacatcgcaaaactgccttagtctgggcatgttttatttacataccctaacaaaatgcataatgcctttcctttgtggtatgcaatgagtgctccctcacacttgtgcattcacaaacacacacacacacacacacacacacacacatctctaccatcatttgagcatcatcaaaaatacaaaaatgttttatttactgtttttcctgacatggtagtttaactcaaatttgcccagattcacatagctaattggcgataggaaaaaacaaacaaacaaacaaaaaagcaagttagaacaaaaacctcccaatggactagtgagaaggaaacttctgataaaggacatctacaaaaaacctaaaattaacatcatcttgatgatgagatactgaatgctttctccccgaagagcagtaaaatggcaggaatatttactcttaacacttttattcaacattatgctgaaagtcctaggcagtgcaataaagcaagaaaaatgaaatacaattcatatagactgcaaagaagaaaataaaacttgttattctcattgacatgattgcctatgtagaaaatcctaaggtatccataagaaaatctcctagaactaatatgtgagttgagcaaggttgcaggatataacacattcggtgtagaaaggatattattttcaatcaatggtattggatcaattgggcagtaatctgggggaaaattaacttcaacctatgattcacaacttatacaatgattcacaacttatacaaaatttaactccaaatagatcatagatctaaatataaaacatagatttataaaacttttaaaagaaaacataggggaaaatttttatgaccttgggatggacagagttttttaaaattacactaacagcaaaattgataaaataaataattgataaattgagcttcatcaaaatttacaacttttgctcttcaaaagatactgttaaaacactgggagaaaatacatgcaaatcaatatccaagaaaggacttgtagccagaacatataaagaatgcttaaaacatagcaataaaaaacagctcattaaataaaagtttgaatagatcatttagcaaagaaaatataaagattacaaataaacacatgaaacagtgctcaacattattagacattagggaaatgcaaattaaaaccatagtgatatatcactatatatctattgttatcaccaaaataaacaaaaatgacaatatcaagtgctggcacagaagtaaagcaatagaactctcatacattgctggtggggatgcaaaatggtacagctactctgaaaagatattttggtagtttgttataaagttatacacatcttataacccagcaatcccacttctgctatatattcagcctagaaaaatgaaaaatttatattcacattaaaacctgtacacaaatgtctgtagagatttattaataatcaccaaaaactggaaacaaatatctttgaatgagtgaatgtattaataagctgtggcacatctacaacataggatgctactcggtattactcatatttgaaacaacacatgaattttaaaggtgttatgttgagtgaaataagctaatctcaaaaggttacatgctgtattattccatttatgtgatcttatgggaaagacaaactatatagatagagaatttactggtggtttccagagtggggaaagtatttgacatgaaaagctgcatgaaatattttttaggatgatgtcattgttctgtaacctgattgtggtggtggttacgtaagtctatatatctgttcaaacttacagaactctatgccaaaaactcactgtgtgtacattgaaaaatatgtttgtattaaaaatactaaaattaatatttttggttaataaaagctaggaggcatagttcctgacttctagttctatagcaattcctgcttttctcattcattcatttattcattcgcttacttatgcttttacccaatcaacatctacttaaaatctatatatactgtgcactgaggggacacacaggtgaatgtgatatcatccttaccatcaaggagcttctagacttgtatttgaatgatggacaattcaaatgatggacaagtattagaatgttgctagcacactctgacaaggactttaatggagttgggaatatattgtgttgaatcataaatgagattgagactaatgacctaagcaagttaggggaaccatctcagaaacagaatgtttgatttggtactagggattagtaggaaattatctgagcattctggatagagagaagaaacttgcaagttcccagaatcatgagaggtggtatgtgcaaggctgtaaattataatctggaaaagaatgaatggagataggttggtgaaggtgggttgaagaggatctatgagggaacaggtaggtagcttcctgagccacagttcatgctgcacaccaagccatctatggccatccttgcctgtttataatgataaagcttcatgaagcaattatatttcccccagctgcagtctcacatatggatggtaccaatcaatctctggtcacttcaccttccgttctacctgcctcttttatctgcttgtttcacatttaagatacaggaagagatagatgaaaagctaggactcatttcagctcattcagaccccagcctccatctctggagcacaaggcagcttttgctctgtttccctggtccccgatccagactaacttggctcataatttaggaatgattctgagaaatggagaagtcaagtggcttgtctagtggccccggacaagtggtggaggagcagactgtgactgtggtggtagagcagaccagagactagcatcagtgatgaggtcaggtaacatcctgtaccctgcttctcagggactgtactctgagcagacagacttatccagtaccctcagcactgcgtccaggtcttttcttgcttgatgacaccggacttgccaagcctgcctgcactatctgcccaggcagataggtgggcctggggagggtgttgaaatgaatgactctccaagccctggtagagggttgcactgccctggctgaagtgtgggcaccagcagccattaggtaccactctttctgctcaatctccatgggagccatgtttgcaatttgtgtttatctttttgagcagtaaagagatatggtcttctagctattcacagacaggcagacgtggagagtagacacctaaattctaattccggtttttccactgagaggctgtgtgatccagggaaacaagtaaacctctctaggttcctttttcctaattataaaatgaagcagaattaatgatttatttattcattcagggaacagaagcaagatctgctcatgaaacatcaattaaatattgctctatgtagttcccagagtaagatggggatactggcatctacgcaaatattaatatagaaatttgtgcttttcttatgtttgttcattggttcacaatccactcctctgtaatggaacactcttcaggtatagaagacaagtggtcctcaaaccaagcattataatcacctcacaaatacacacacacacacacacacacacacacagacacaaacaaacaagcaggcacacacacacccttacctgggccccaccacaaatcaatcaatgaagtatctcctgggaaaggtcctgggcattggccttttataaagttgtcctgctgattttaggacatgtaggattgagaaccaacgcactagatctgagctggttgaactttaacatgcatgtgcaccatctggagagcttgttaaaacatatactccccatttctgacaagctctcagctgctgcttctggcctggggactgcactttgattaacactgcactgcactgagctgccgggtatatacagataaaaaggacacaatcagcaccaagtagctcacaggctaatgggagaggcagatatgcacacagatcattgttgcaacacattatgctaaaggccacggagattctgctgtaagtatcatggaaaaagtgctgtggggaccaaaaggaagggttgtgcaactgctgaggagtgaccgaaggctgcacagaagaggccatagctaagcctcatcttgtgggatgaattggatgagtttccaccatccaaagggatggtagaaatggggtgtgggaaagttatgctagagctgtgctgtccattatggtagtcatttagtcacagtggttattgagtccttgaaatgtgctgtccaaatcaagctgtgctttaagtataaaatacataccaggtttcaaatatttattatactatgaatgaaaaattgttccttgataatttttatattgatgatatgatgaaatgataatattttgggctaaataaaacatataaatgaacttcacttttctatttacttttaaaacatgattactgaaaaatttaaaaggtcatttgtggctttttcttttaatatatactggatggtgctgctctagactgaaggagccccagagaagcagcacagagcatggctttttcagttgtgtggtgtggcattgacaattctgactttgacgctgactccaacactctggatctaacccaacatcagctggtctcttttcttgtttatatatcggaatctctcctctggcctactcctagtctccctctataggagacagacttcctgaattaaactgaaagcattaaattattattttttgccctggcaaggtttaaacagggcaaagccaaccagtttggttaacaactgtgcgaataatcctatttctgtcatgagattcaggattcaaatggcttttcctcccattcgcttctggaattcatctttctctgaatgtccctgcacatgctttctctctgacacagttactcagtcacagaccgacagacagaaggacacacacaccctccatttaagaggcaattaagtgtcaatagagagagtattaactcgatgacataaaagttggagaactaactgtcatttagaccttggacaaatttcttagccttcctgtgatccctcatctggtgttttacctatttgaaaatactaacaaacataagaagtatttttataatttatttttttcatcagtttactaatgatgatcttgttatagagtaaaattgtcaacaagggagatttcagttcaatgaacaaagcagtaacaacagagagtacccaaagatgacctgacctgggctgctttgtgaagtagtgagctcctctgcatgaaattcccaagtatggtgtcccatggggcactgtgataagtgaacctgaacatgggcaaaacattcgaagcatctagacattctagaaatgtgcagaatcaaaacccatagaacatatgccaccgtcctttgttttcttctcatcatcatcccgcattaagcaatcacggcacttcttctaaggcaagataaagcctaatacttcttaacagaaattccaggcatatgtaagtaatcaaatgagcttggcacacaagtgaaactattagctttgaagactaaactctaggctctagatacatatattattggctctttaaaatattgattaattcaataactttggaattgtgtgaactcagagctctagcagctctttaagacttcagaggccaaaacgaggacaaagtgggggctaaaggcaatgggactgcagactgcttgccttctgttcaaccatagaaggcagagtaaaactcactttatggattgagatataggattgtctttgatagaaggattccataatcaaaaagtcagaacatataagaaattcccacattatattacattccaaaaggtatcaaattgtataacaacttgcccaaggtcacatagacggctagtgacagggagtgacccagtgtgtagattctagtcaaatacctagcccagtttcctttccatgtttaaaatacgtaaaggttagaatcacaggtactggtgtaaaatcacctgggttcaaattctagctccgtcacttcctagagctgtggaacttaggcaaattacttaatcatcctgtgcctcagtttcctctgctataacagggaaatgataataattgtaactccctgggttgttgcaagaatgaaattagttaatgcatatagttcctagaacaccaaacaacacagaatgagcagtcaaaaatgctactgttgtcatcgtcattgtcattgtcatcatgatcttcatatagtcatcctattcagggtcagtttatttagcaggtacagtggaaagagccctgaatgggatggtaggactgctgagatattcagtgtcactttggtttctaaatatctgtaactgccagattgcctcctgtgccatcaaggaggcagataatgctgggattctcctatgggagatgagaagtttcaccaaagctcaaaatccatgaactcagtagaaggaatggaaacttccttttattgtttgttgcctttgtttgtttttagaatcgattatgcttcaagctctgtattaggtatttgcagcaatattacttccttccttgtctttacagataggttagttgcactccccagtcaagaaaaaggatgctgatggaagctaaataactttttagagttaccttgaatctgcttgttttcacttattttcatttgagagttaatgttacataaaataaacagctcacgggtatttctctaagagaaggcctaaagagctgaatttgctttttgttcacaattttaattcactttttcaatttgtgacaatagtatattattacccaaaggaatggaagttgagtaaatcacagaaagttttttctctgagatgacaagaggcttgatgtctaggaagtttgaatgcttagtaattctcaaaggcaaaacataatcacgggacaccatgtaattaaacataacaaaatgtagaggcttttaatgtcattcagttcagtttaaccagcattcactgaagctttataaagtcagcccaggaagagaaaagtggctaagattttatttctgctggtaaagaggtgatccttttggaaaggtatggcagaaccagaactggactttacagtgaaatttgttgatgtagatgaggggcttgtcttgctgaatagagaaaggctgtggctgcctgcctgagtcctgtgcaactttgagcagaaatacagcctcttaggaagaaaagaaggctaagggcgtcagattttctccatctcttctcccacattcaccagttctctaagcatcctaaggcatattcatttgtgaacatcctgtctccatcactggcataggaatcttctgagggcaagaacctgtctgatgttctctgcttcctggaacctcaggatgtgtctgacacctgcagcttctctataccccttgagccaatacaaaaggaatgaatcagtcagtgtaaggcagcccttctcaccatatgagatccttggtcccacgtctgtatggtgagaagacatggatgctggctccatttaaatgatgttacaatgctccctaaagggcctgctagctgtagagctagtttgaaataggggtgcatatttccaaatagcagaataatcttctattcctggtgcagggaacaaagcctttgacttttcgtttttgtaagtggagcagtgaccacaccagctcttagaaatatattaggaagacattttacatttagaaatatattaagcatgaagattatttaggaaatcactctctagtttttacatagggatatccaaatgagatctttctactgtctgttctttctagtttttcatttgaggatatttcaaaggagaggttagaaaatagaagttcaagaataagaattaatcaaagtcaattcattaacatgcaagtatgtcacgtatttcatgagctttgcttacataaaagtccatgtgcatttttaactccctcattcaagaatttcctttcacatagcacaatttcacatccaggttaaactcaagggctacctcctctttgaagttctccttgatttgtccagcccatatactttctttcttgtccgaacatccattgcacttaaggtaaacgatgatttaaattcagaatatgacttcactgtagaacctgtgatatcatggtctttcaattctccacaacaaaataggacatttattataaattgaatctgtaaaagatgctgagagttggattcctttccctttctcttcataataaaaaataactaacatttattgatcttttaaaatgtatccacaatgtgctaaacaattttcatgcataatcttgtttaatcctgatgacagtcctcagaggcacatactaaattgtctgtgcctcaccgctgaaaagccatgctgctacttggccaaggccagtctgcacatagtaagtcccggatttgatctcagcactttctagcttcggagtccttgctttcagaaccactggagtatgctcaagagatctggaccactttcattttatctggtatctggcgttattaaaaaacaaataagaaggccacacttgttggaagcctatttggggattttaaattatgtcataaatacctttgtgaatttcatcatagaatctctataactgtattcagcctcatttggaagtaatgtctagaattctaatttgagacattttgcatatgtgaggtttgaacgaaatgatattccctgctcacccttgacagccacagttcctccacgaccctgagtcacttctgtttgaccgccaggcctgcctgacaatttagtttccccatgcccctacttcggttctctcctggcagagggcactgcggcacttatccaatctctatgttttgaaaaataaaagcattgagacttccaatatttgagtccagctaagacggcaaggccaccaaattttcagtgattttcaaaaactcatttcagtgctgtcttcctgttaaattggacctttcattccatactgagcagtggcaagtagagagcgagccaagaactaggacaagcttggcacaacattatacctgctatgggccaaggtttaggtaggttttgattttgtttctggtggcctcgaatacacttgcttcctttttcaaagtgtccaaatgagagagtgaatagtaaatagccagagggaaatgaaccagtgtgtgggaataagaaggtgtccccctgtgtgtacctttgattaccagtgcaaagggctttctgagacactggctggtaagaaggaagcaggttgccatatcaacacctgtggtttctttacatgtttttactgcaggttttcattgttttagtgctttattctaggagtaaattactaagactgtatggttccaagaatattcctggtgggctagcagcaatgtgctccaaagcacagcctgggctccctgccttcccctctcctctcagccagaagtggaaatccaggccactcttggctttctctgtgaaccaagacaaaaaggaaggggcatacaggctgtccttaaagcatgttggacaagctgttgctacagggtcagggaatgagggtaagaaagcctgtctctttccttataaggaaggtcatgaccaaattgcagagcagaaaggaatataaatcattgaacatgcacacatgtgttcattacagcactattcacaatagcaaaaacatgccatcaacctaaatgcccatctacagtggactggataaataaaatgtagtacatatacaccatggaatatcatgcaaccataaaaaagaatgagatcatgtcctttgcagcaacatggatggagctggaggccattatcctaagcaaactaacactggaacagaaaaacaaataccacatgttctcatttataagtgggagctaaacattgagtacatacagacacaaaaaagggagcaacagacaccagggcttacttttgagggaagaggttgggaggaggatgaaaatagaaaaactatcgtgtgctatgcttattacctgggtgatgaaataatctgtacaccaaatccccacaacatgcaatttgcctatgcacatgtgcatcctggatctaaaatagaagttggaaaggaaaagaaaaaaaacagtggctcctgggtttcatttggagtgttggcctcaaggtgtttggcctgtaccatcttttatatttaaattacctctcaaccttttttttttttttttttttttttttgtgagatggagttttgctctgtcaccaggctggagtaccgtggcgcgatctcggctcagtgcaacctctgactccctggttcaagcaattctcctgcctcagcctcccgagtagctgggattacaggcacatgctaccacacccagctagtattttgcatttgtggtagagatgggatttcaccatgttagccagggtggtctgatctcctgacctcgtgatccacccacctcggcctcccaatagctctcaattataaaaataaggaaatttaacatttaaaaaatagaggcatttagcttttcttagagactcagaatgtcttctttttgcatatgaattctgtgtggaggagcagttcccccttaaaataggcgaatgtttgcatttgagtgtagtctccgctgctcctcagagatccctgacactgagaccttgtgccagccaccatttatcatctacccccgctagttttactctcatacataatttgcatggccccttaagcgtttgagtttattaggatagttataaaggcctgccatgtcatacaaagttattcaggccatatcctaaggcactcagcaatagtggttgttttgaggctgggaggtattagcccaggcttaggctttagagatgcctttggctacttgtttcaagtccatccagtttccaattcatcatccacatggaccctagatgtgaaatgagtgcagaaggaacacagatgacaagaaagtgtcccaggcaaagagcacaggtaatggagggaagagaagaaactctggaaacacttcagaggcagaattgtcaaggattgggaaccaaatgggatgcagaagaaagaaaagtttagaggctggagctactgtgcagatgatgactgttgatggggcgaatggaatcaatactagacctagtcagattatagttaccaaaggaaacagacattgctcaaatttgaacattcaagaaatagttatatacagcatgtaatgaatacatttcccattaaaatatttctttcttaaagtagcatcatgtttctaaattaatatgtgtagtaactagctacatatatgagtaaaccccttcctagacagaggttcttttagaaaggaaaatctctaattcactgcttattcctagtacccaaacaatacccaatatgtagtgtgtgcatgagaaatatttgctgaatccatccataattacttaaacagagatcatttaaagtacccatagtttaatctcaattgttatacatttttttctgtaagtcttttgcttttatttatctgctgcctaccacttccttctctgtagcccctgacacctctgcacacatatgtgcacatacaaggaaacaattgcattagataggcatatgtaataatgcatgtggttttagataataagatttctctacttttaatcttaaagtgatttctactttccattttgatcatttatttttaaatttcattaaatgaataaccttttttaaagcaaatttttttggtggattcttcacagagactcacctgtagtttttccttaattaaagagcaaaaaaaccgaatggattccctttccttggataaccttctagtcataatcagaaagccttttggagccaaagatttcccattcagctacagctggtaccatgcattttttgggttgcttgaggcgagggaggagggttcagctgttgagatctctagaagatttttacaagtaattatgtaagttttgtacatgttatgtaagaagtgaatgcattcttgttgtaaaaataataaaaatgtatctaatgtaaaaagcagaggtctcacttgaattctgtctacttccttgagtccatttctttgcctaaaagtaatcatagctaattttcatatgtatcctttaaacattgttctgtgcagtatggcacaagcctaattggatcatactacacatgatgctaactaatttttgaaagattgcagaacagtgcgttttggagaaattaccatgttgaagcatacgtatccaccgaattcttctaattgcagcatagtactctgtcatatgcatatatcatagtttatttaggtgatcattaattcatgggcattgagcctatttctaattttttactactatgaacaatgccactgtgaatatcgttgcccttgcctctgtggaaatatgagtctttctctagaaaacatctagagaattagaattctctaattagaaaattagagagaacagattctccttgaattagaattgctgatgtaagatatgtacctttaaaattctgatacatatttcaaatttgttcttccaaaaagctataccaaattactctttcagcagtctgatatgagatgaacaatttttccacttctctgcccaaattagatattacgattttttgggaattattataaattctgtggacaaaagcatgaaatctcactgttattttaaattaccttgttgattcccccatgaagtagagttttgtatgctacctggggctccctcatgattttcacttgtatctaagcatcactctaccctcctgtttcagatgctcactacctcacctgcaggatccaggaatgtgccgagacaactagaagtgggccttttgcccgctccattgacatcagttccctggttgtccaggatgaatatatcttcattcaggtgagtacagaaagtgcagttggtggtaggaggatgcatcgttgaagttggctgcctgctaggaaaaggagggtggctttcccaaggttgtgaagatgtggagttgagacactgtccctcctttgcttcagggacccagtcctctggggagagcccagacttctactggttttagtgatgcactgaatccttccattggattgccattttatagcacaggagctgtctgaattggctagtcttgggctgggtttgaagtaacttagtcaaatttctaatgggatttgactttaagtaatttatcaaagccacattctatttctacccaaagtgacttgtataacttggcaatgaaaatcccctgtaaattaagcatctttaggattctttttctggaaatacctactactcactaaactttccccttctttccagtgctgactaccttctcaatgtccatgtcccaaagcgtttactcccagaactgagtcttaggaaaaattagatgggactcatatttaggcagagcagggaagccttcttttacattttcggtcttcttatctctattgtgtactataaggaggtacaaaacaggacaaaaataaggggaacaaaaggtagtgctccaccagatgactgacagaggatgcatgtgataaatcaaacatggtatttgattgcaaccttgatttcccacactctgcctttccatccttctattctcagttgttttgcaaactattcccacaggaaagttgaactttgaaaactccctgagttggctcagacctaagcacctgaatgaccttctctacctgacccctggtagttcagtccagatcaatcccatctcttctaggagactttctatgaacttccaagctcagtgtgactctccatcctctgaacccttgcaactttatggtctataccattcctctagcacacaggctatcaatggatttgtcttctctccaaattgcattttacactctctgagaatggtgatgatattttatacacacagttgacccctctcccttggccctaacaagatgtctttgcatatcaggggtgctcagtcaatatttgttgtattgaactgattgtaggcatcgcagttacttctatctataacttagttacatagatttttgaggtctagtaaaatacaggaaaagtagctagccactcaaaaaccatcttcgatgagggagtgaaacaggaaggttctgtggcttcaaaaatccctgttttttagcttgactgaaatgcagaatctcagaattgtatttctaagtcttggcaggccaacggcactctcattctcttattcgtaagtgtttgtttattgaacacatacattgcaaaatacatagcaccagtcactactctagagttcctcaagtttctgcccttgacctgcttctctacccagtactcgctgcctgagcaatcccctggttttaaggactatttccaaggtttgatgactttcaagtcagtgagctgtgacctcatgtactgcagccttccatatcaaataaccaactcaggatcccaacatagacattccacaagtaaaacagaaccaacaggtcacccttgaccttgacccttacacagtttgtggcacaaccccctaccaggtcagtcaaagtcagtctgtgttgccaaattaaatgaacccacagcctctgttaatatctctctttgtgatttctgtagtgtttccttttattccattctcattgttatggtccccatttaaggcctttatctctttctatttagatttttttttttttttttacagtggaagcacaggagtgagttatgaatttaccagtcggatttcccttcccttaatgctaaatatgctagaattgtttctcggaaacatgacttagaatgtaaaatgttcagacttttttcatttttccttgtgttccataaagtttgctgtaactccgcagacagatacacagatttttttaaaaattattctgaaacattccttttttattatactggaagcagacggaagttttgtctttaattagcatcaatttttattttccttgaaaagatatgcggtttcattattcaataaagttttactcattgccaagtatatgtgaggtcccctgttctaggtgctaggtgctggggttaggatagtgaacacaacaaagtttctgccttagtggcatttaattctagtggaagataggaaaaaatatgtgtatgatgtaaacatccatatatacatagatgaaaagttataaagagtaatggttaagaacatataatttagagtccaaaacctggcatttgttgaaactgtggcattccacacttagctgtgtgaccttgagctgtgcatcatttgacttatctataaaaagaagataattgtagtacctacttcatgggttgctgggtggattatatttattaacgctatctgtaaagcagcaaaacgatgccctagaaacagtgttatatgaatatttgctttctatcttttatctatctacaaaatgtatcagataatgacaagtcctatgaataaaaataaatcagggactgtgaatattgaagctataaaggtattgctgttttatttagggagacttaggaaggcctcattgagtggtgaactaggaacacggtggcagaagatagtgcagtcagagaggagcgtggagccaggttgtcaggccttggcttccttgagcccacatgaagatggggagtgggcagttagagatttgagtctgggttcaggagcgggggttcgtcatggagcagttgcagctgagtgtatccattgtaaagtttatagtatattggtggcatttttagaccacacagaattgccagtcgcagctgagttgatctattgtaaagttgccagtatattggtggcatttcttagaccactaagaaataagtattgatagaaaagagaaaccatccaaagactgagcctcaggctactccaatattcagagttcaatgagatgagcagaaacctgcaatgagacctagatagacaatttagagataaggccggaaaggtggaggtgctagatcccactgggccttgaaggctttatttttactatcaatgatgtgggaaccaatggattaacaatgccccaaataatgtgaaaggccaataaacttgagaaaaacattggatttcattaatcatcaactaaacacagattacatggtatcatttgcaactatcaattagctaagattgaaatatggtaaaagaatgccaatgagttgcaggtagacaactacatacagtgtaggtacaaatataaatcagtggatcatcagcatttaatccacctttttcttctcacaggtgagtttggccatttgcattgacagatatgacatatatgtcttagttttgacagtatattctttgtgtttaattatgattactttaaaactcccattatatggtctgtttgctttcctgtgtgtctgataattttgagtatttgtatttttgttctaagtgcttagctttatgaatagaaatttatataacatactgaatcttctatttctggacaatatctattgatttcctgttggcagcaattacaaaatcagtgtatttccttgaatttctaattttctccctctctttaattcttccactacctaattttgaataattattttctaatgtttgtcttactgccttaaaatataattctgttagacttaaatattttatgaagcactacagaagaaaggtgaaaaaaatagtatgtgtttatgacctcttgtcagattcctttttccaaccccagtttgttgacgtcatcattttagagcatgaacattctactctgcactgtaattcctgcatttattttgattttagtcttataggtaaatgtattcagttgtccccagaagtctttttcctatagtttttcccatttatctcttggttatctgaaatttgtcttccaagaaaggctaattcttgaatgctgaaaatatgtttgtctgtatctttttatattttaatatcatttctcagggtataaaatgtatgtgtcatcctctttccatgagaatttttactccaataatttgttactattcagaccagtctcatatttttcattaaggcatcttgttgttgttttattttgttttttaacttcaatacttaaagcctttaaaaaatattttggccaatatattgttatcaaatatattgatacaatatattatatcaaaataaaaaatattttgataccaattactcattagttagcatatgccttgtggttggccataatgtactgattcttctggaatattaatttttttgttaaatagattgaattttttctttattttttaatttctcgggagtttctgtggcatatcttgaaatatgttttctatttcagttttgtagttttggttcctttcttccaggacatctaggatgtgtacactagacaggaaagacaaaagagagccataatttctcccatcccaacccttttttactccctgagcaaactgaggaaaatgagattaaaaacaatcttacattattttctaggctctttttgctttattgctttttttttctttttcctgtttttgtttaacttcttttctgagctttgccagtttatattgtgtctctttctctcgtatcaacataccttccctgagctcttgtatttctgcttcaaacccttctcttatagaggtgagctcttcatcatacaggttattttaaattatagcagtgtgtttgcaatttttatttgctctatggaagcatattttattccatatctgttatttgtttttcctgtccctttctgtcttttattttcctatattattttatcattattatgctattttcttttatctttatatgtttaactattgcttattttttaatgctgtgagttcttcccagaaaaagtatttgaggaggttcattttagcaacagattagggctctgtttcagcttaacaagaatccttcttggttctcactgaggttctgtatgactcaagattgttttctctgtgagtgggtccttctgataagacagaaccacctggaacacaatatatatgactcctttcccacgtatattgtgtttcagagttagattttcattacggatagagtttgcatttccctttcttatttttcttattgctttagggtgatttataataggaaaagggagaagcatcattatgatttggctatttaaaaccatttataaatccttattatatattttctgaaatgttacaagagcttactaattgattttcttctcccagatcaacaccaaccttccccaccagccagtcacagggctaaatcaatatttctacattcagtggcagctcatcacctatagggtgaaatccaatttccttaccattgtctacaaagacctctgtgacctggatcctacctactccatcagtcacatatgaattccttacccaccactgctcttcacattccttccttgtttcattgtaaccttcaataaacataaacctctttagtctccatgcacaaactgtgccatttcttactgtatatgcctttcttatatatttttttcctgcctgggatgtccctttaccagacaaatttattatttaaatttaggacagacagcacctcctgtaggaagtcttccctgacatcctcagtcgggattggactaagctccaatgcagttcttacccatttgcattatgtttccccagccaggtctctaaaaggaataggactgtgtgttattcgtcattgcttctcttgcttctcctgctcttagcataattactggtactcaataaatgtttgctgaactgaactgaactgagaagataagacaccatcctattctcaggaagtgtagttagttatctttttcaagcaagggaatcttgcttctgcagctaacaatacaggacaacttagcctaattgacaattgctcaatgcgtaagaaatgaccatgcaatgtacaatgtctctgcgtttttataaaactgctgtccaggaattgcccaatatattattcattgtcctttttatattcattcatttaaatgtattaaaatacattcagcccagtgggaaatgcacataactaaacaaatataatgtaatatgatgagagctgtattagtgcaaagcacatgttgctcttggagaaagagcctttcacctgaccctagaagagggtcagtacaggctttctcaaaagaaggctatgagtacgaattaagtaggtgaaggagaaagagcattctgcccagaggagaaggcctgggtaaagttaaggaaataagtgaacacaatgtaccaggacctcttatataaggggcagttgtaattgtgggagggagtggagtggtagaaaaagaagttggaaaattgaactgaacattttctgttttctttaattaaatctagataatgttgtgttcccctctttatagttgctagaaagcacagaactaatttttgtgtgaattttagcagcttccccacataaagcttatggtattgttatttttcatatccctttatgctttgccataggccattttttattccttggctgctttcttatattctttttgtttgtttgtttgttttattttgtgtgtgtattgcttttaaaaaattattagaaaccatctcaaatgattttctgaaaccagtgtcatttaaaaatcttttttggggtggggggtataagttttgaaaattgaaatgatgattaggacgggctttatggagaaggtaagatttgtatcgatagtaatcaatatctgcctgtggcctagaaaagggcgagctttttcattctgttcattgaaataaagttgcctctgcaggttttgtcaaagcagaaaacccacagaccaacagagtagcttttcctactctattggagaagctacacagatgctatatgagcacagtatcagggcatcagaggaggtggttttctacctgttcctgcctaccagtctatcaaagaatggccttggtacaagaagtcatagagcagtgaggcttgagtcccttcaaggtggcattcccagggagtagcgccaaggcagaactggacattgaggattgtgcattccactgacagatgcttactggtttggcttttaaaggggatccgtgtagaggcagattattttttattcctactatttaagcagttaaataacagcaagatgaggacgagagactttggtgggtttggtttttcatgactatagagatttgtctacttaaatttcgaacttttaaaagtattgatgtcttatatttggttttagtgctaacagagacatataactgagaaagaagaaacaacctcacaaacaaaggagaccagcctttcccttcgtcctttcccacccttatgtgccaaatggaggaggacgcctggaaaggctgggctttgggcttcccagcacctcctcaaacggagcaactctgcttttgtttgctctgtatattaggtttcctaatactccttcgtttgacaaaaggatcctgctgctaaaaaatgtttgaaaatcactgactttttgcagccctgttggctgcattggtcaaaggtgaggcttttccatgtgtggacagctgaaccgtgtggaatgcaggtgagatccaggctcaaatcttttctctgcatattaataaatgtgatgcacatatttaatgtgcaattttttacacatgagtgagagattatatacaaatgtacagtatatgcatttgagagtacagtttaaataatgaaaaaccttggtaacctctttataatgatattcattcattaaattaaacctcttcccatgacattaaaaattttaccctctcctggttgcccctataaaggaatgtgcctcatacccaatcataattttatttctcttgacatattatttttaattctgtgtcttatgtgcagtagaagggtccataaaccacccacacagctcctactatttagagagacctggaagttctctacttcaccttttattttcctattgactaggaggtaaaggtagccatcctgatggttttgcttgggggaacccagtgtttgatctcctgctgttggacaagctgagctggagatatacagaaagctgtgaaatttgttaatctgtcagttccttttctgtgtaggggacctggggttttgtagcaaaatcaaaagaagctaatccttcccagaagagcccttgttttaatagggaagagtctgcctgaaatgcctccgttccacttggataaaagagaaatcggctttcctctgtaggggcaggggaaagcagtaagttgatttctgtgttctgagccaagctggttgaaaatcctgtcttttctccttatggagtagcgtttctagtgattatcctggagaatctgtattttagcagcagttgcaataaaattcctttagtaataagattcataccctggctacccttgctactagggaatgtgatgaagaaacaagaacagtcccttagtaacctgtcaccagcaatgtgtatattatgtctgcagtggattgtgtgaaaccctgccctatactctcttcatggcacagagggtggccttcaatgtggtaagagttcatttcataaaagaggtataatactgacaagtcttcaaaaatttaaaacacaagaggaaaaaaaagtccataattaagatacaaataaagtactctagaggtaggaagaaagcagaaaatttggaagagggacggtcatcttgcctctgccaggtctttctccacatccctaatgtctttgttgccttagcacagaatgaaacttttccctcgctgttttaagtgagcctgtagtaccctgtgagatgaggtgctgcaacttgaacattctggaaaagggcatggtttttaggaactgagcacagggaaagggtaggaaccctaaagatacagttggccacttgagcctgggagggtttgtgctgattcaggccaggagaagagagtggcttcctgaacctgtggcacccacaaccactcatgcaaacccagaacagctagctactccctgaacctttgtaaagatgccaagcggacaggtaacactgtgtagatccatctactacccagtggtattttcaactctcagtaatattctatagacctggcgaagaaaaaagaaaccttatgtaacaaggaattctgaggtggagcaataacatgtatcagactgtttctaggatgataccagtactacattgaagtcaattggtagcttggatacatgttgctgttagttttaagagttctatgtataaacatagaaaaatagtactgttataaagtgttgggagatgttccagaagtactagcaattaacaagtattggtagccaattaacagatacttgttgagccctagaagtatgccaggtgcaatggagcattgccctggtctccatcagtttatgattcaaatagctagtggtctgatgtggagaaaacagccctgactttaaagacctgggttgtaatcaggaatctgccacctaccagccaggaaatacgacacaagtcacttaaactctcagagtactaattttctcatctctgtagaatggaatcatgctacttgccctttctaaattggaaggttgttgtgaggatcaagggagataataatggctttgaaatgctttgaacgctacaaagccctacaaaatgcaagaattgagagactaatccacatgcaaaaatcagcctcactgtttagtgtatgcacatcctcttttaaggatttttataagccgatcacataaaagattactagatcttttctccaaattcgtttttaaattattcatagattcaattcatgtatcaacatatgtgcatgataaaagcttcccacatagcttccatggtgttggtttctttgataaccaacttttaatgatatatatgagatgtaactattctgggatttaattaactttcaagactgtttttgcatcttggtctcagctcacctggattttggtacttcatctaagatcctgatttatatacccatcatggaaggtagacaagcctctatgatgtggctactgtatccccagtaaattactatctttctgaaaaaaaccctgaggcagaaattaatagagtgtaattattcaaagaaaagctatttggagatgttttaaatgatgttaatttggtcttaatgggagagattttgaatgttaaataaatagcaattacatcattagggacacatttacaacacgggagtttaaagcaaaatgaaagagttacagagacagtcttcaaaagaaatccaatgaagacatcttcaggtgaatattcttgaagtgctttcagaatcttaagtaaaagtgttttcaacagccagcccaaatggaggttctttaaatagcttggatgcatctcctatatgtgtaatgattatagtggtttgctgttagtatttgaaatacttctatgaataaacacaaattagtgatctgattgcaaagtaatgatatttagttgacctttgtatggagcatactccatctcacatccttccagctatgtttgcctcagctactagctttgcgcagaggtgacctgctatcaccttgcctcacctgcactgtggatcccctgttccagggctgatttattcccaagtaggatgcttgcaagagactcgttacctattctggtgcagatacaagtcttgaaggtgccaaaaatctgggacaacttcagcaacaggaatccaaagctggtggatcagtgctggtgggaatgtaaattagttcagtcattgtgaaaagcagtttggcaatttctcaaagaacttaaaacaggattaccattcgacccagcaatgccattattgggtatatgcccaaaggaaaataaattgttctgttgtaaagacacatgcacacatgtgttcatcacagctttgttcacagtagtaaagacatggaatcaacctaaatgcccatcaatggtagactagattaaaaaaaaatggcacatatacacagtggaatactatgcagccataaaaaagaacaagattatgtcctttgcagcaacatggatggagctggaggccattatcctaagcaaactaacacggaaatagaaaaccatatacctcacgttctcacttgtaagtgggagttaaactttgagtacatatggacacaaagaagggaatggtagaccccgaggcctacttaaaagtggagggtgggaggaggaagaggagcagaaaactatctattaggtactatacttattacctgggtgacaaaataatctgtacaccaaatacccatgacatacaatatgcctatataacaaacctgtgcatgtaccctgaacctaaaataaaagttaaaaaaaaaaacaaaactaatggatcagtactcttctcttatgtcaggtaggcaagtctgagcctcattctacatgaattttcataggctgtctagtgggattgagccctaattgctgacaataataaccagtttagtaatgcaccctggaatggccttctctccctccctgtttcctgcttcctagtttcaccactcctgtccccagatcattcctcaacaaacaaaaacgataaactacataaaagtccttgactcaggctttacttttgggggtaacttaatgcaaggcaatcttgaatgactctcaaatatttcttggatccctgctatgtatccagttattgtaggtagagtgaactatttaagtgaagtagaaggcattgttctcatccccatataaatgagattcctcaatctaaacatccatttccatccctcttctcaaggacctggcactactgatcactctcctttcccctgtctttagcttactcatccctatgttagactttccatcaatatttaaatatttttaaaatatccaccatcctgacataacaaaacaaagtagggtaaaactttctttgaacctacacccctctgtaagtctcccatgtttcattcacaatcaaattttttgagcactagctgtattcataatcccatcttctcatttccctgtctctgtaactcacttgagactgacttctgcctctgccactgcattgaaattgcttttgccaagttcatcaaaggtatctttgaagtatatctagactatgcctctcaataattaacatagttgaattgtctagagaatttgaacctcttgactgctccttctttcttgaagcattctcgttgcttcctcaataaggtacagttcagggtcccctctcatctctccatctttccaatatcatcttactttccaacacagatgcctcttcctctgcccactctttaaatatgggtttttcctcagtgttctttctaggttccttttctctgtttacttcctaccctctctgatatggtttggctgtgtccccagccaaatctcatcttgaattatagttctcataatccccagtgtgtcgtgggagggacccagtgggaggtaattgaattatgggggcggttatccccatgctgttctcgtaaaagtgagtgagctctcatgagatctgatggttttttaaggggctttttccccctttgctcagcacttcttcctgcccccgctgtgaagaaggtgcctttcttccccttctccttctgtcatgattgtaagtttcctgaggccttcccagcccttccaaagtggaattgtgagtcaattaaacctcttttctttataaattatccagtcatgggcagttctttatagcagtgtgagaacagactaatatagtaaattggtactacagagagtggggtgctgctataaagataccccaaaatttggaagttattttggaactgggtaacaggcagaggttggaacagtttggcaggctcagaagaagaaagaagacgtggaaaagttttgagcttcctagagacttgtggaatggctttgaccaaattgctgatagtgatatggacaaggaagtccaggctgaggtggtgtccgatggagatgagaagcttcttgggaactggagtaaaggtcactcttgttatgctttagcaaagagacttgtgggtttttgcccttgccctggagatctgtggaactttgaatttgagagagatgatttagggtatctggtggaaggaacttctaagaggcaaaacgttcaagagaaagcagatcataaaagtctggaaaatatgcagtctgatgatgtgagagaagagaaaagttcattttctgggaagaaattcaagccagctgcataaatttgcataagtaatgagccaaatgttaatcatcaagacaatggggaaaatgtctccagggcacatcagaggtcatcacagaagcccctctcatcacagtcccgaggtctaggaggaaaaattgttttcatgggctgggcctagggtccccctgctgtgtgcagcctggaaacttggtaccccgcatcccagcctctccagccatggctgaaagggaccaatgtacagctcaggctgttgcttcagagggtgcaagtctcaagccttggtggctaacgtgagatgctggctctataggtgcacagaagtcaagaattgaggtttggggatgttcacttagatttcagaggatgttgggaaatgcctggatgtccaggcagagttgtgctgcaggagtgaagccctcatagagaacctctgctaggatagtgaggaagggaaatgtggggtgcgagcctccacatagagtccctactggggcactgcctagtggagcactgagaagagggccaccatcctccagacctcagaatgatagatctaccaacaacttgcactgtgtgcctggaaaagtcacagacactcaatgcctgcctgtgaaaacagttggaacggggccataccctgcaaagccacaggggcagagctacccaaggccatgggagcccacctcctgcatcaacatgatctgcatgtgagacatggagtcaaaggagatcattttggaactttaaggtttaatggctgccctattggatttcggacttgcatggggcctgtggtgcctttgttctggccaatttctcccatttggaatgggtgtatttacccaatgcctatacccccattgtatctaggaagtaactaacttgttttagatgattttacaggcttataggtagaagggacttgccttgtctcagatgagactttggacttggacttctgggttaattctggaatgagctaaaactttggggaacttttggaaaggcattattgtgttttgaaatgtgaggacatgagatttgggaggggccaggggcagaatgatgtggtttgactgtgtcttcatccaaatttcatcttgaattatagtttccataatccgcatgtgttatggtggagacctggtgggaggtaattgaatcatgggggcggttgccctcatactgttcttgtgagagtgagttctcacaagatctgatggttttatagaggcttttcctcctttacttagcacttctccttccagccgccctgtgaagaaggtgctgttcctccccttcaccttctgctgtgattgtaagtttcctgaggcctttccagccatgtagaactgtgagtcaattaaaccccttttctcctttcttaagaagtttaattacccagtcttgggtatttcctcatagcagtgtgagaacagactaatacactttctctttgagtaagtccatcccatccccttttacagtgtcagttactatgcaaatgccaatgaccccaatgttccctgctcctctcagcataatgcagagactgggaggctctagcaaggggtcgttctttacaggatgcccatcaatcccttaagcatggcaatctccttgctccattcagaactctactgtgcatgccccttataaattactaagacttgtttcttcccaagagatctaatgaggctccatggaagttacaatacctgttgcttgctaggtcaatttggcaaagaatattttcctttaatctcagagaacggttctgtaatttgctacatattataaagtaactatttgcctttataataaaatatgaatgggtcatgtctagcacaggagtattaaattgttttcattttatgtatcacccctgagttattggtagtagctccatagaaggctgtgttattgtggtttggtagaaaagcttctattactattagcgtctccatgggcatgagaagtaagggtggtggtaagcgtgctgtgcagttcattttgcaagaagggtggcactcatggtgtttaattattcaggatgcttatatggagggagccagcctgtgagttctggtcaggaaggcagatgtgttatccaggagactacaagagtttctatcatcagctcaaaggagtgagatcagctatacactctcaatctctttcactatttggaaatcaatttcctacctccaaagcaatggttatttggagtgttctttctacctagcttcaccaccaattttactcaccaatcaacaaacagaaagaattgttgttatagtggaaaacggaccttgcaattatttcacatcaaatttatgtccagcatgtgtgcattttattttatttaataaaactttaatcttcacaggatctcaatatgacagatattatctttatttttctatggaggaaaccaagtttcagtgaaatataggtaatcacccatggttgtatagctcaggaaatggcaaggtcaaggatatgacctcagggctgtctgggtttataaaggatgacacaagaggacaatgattgatttctcatttcgtttttctctgcattagcacctaataattggtattcccagatacttttctagatgactgtgaaagtgaaataagcagatgttgcccccatcttggtagatgttagtggctgcaaagacttgctccattccctattcagtggactctttctcaggatctgtttcaattttgtttcatatcagaaactttctgcatcattaaccaaagaaaggcttaatgggattcaatacaatgtattcatgcctgagcctctgagagctgtccctcagatatacttgggggatttactcaaacacccatccctgggacttcccgtggggactgggtggcagcgtggagaatcatcatgacatccacagctctgctcttctccagccctttcctcctccctgtgtacgtcttgccatgcattatgcatttggagtgggaggaggggctgcctttgggttccattccaggactcagaggagctgttgagtcatgacctcactgagtctccccattttccttcccttccacatgccagcaagtcttccacaccccctctgctaagcccagctccctggagaattccttttctgggtccttctcctattaaagataattacactgctgtaaaaacagcagtgctgataatgagggaagttgggctgttgactgaaaagtagatgatttagtccagttctcttcccattaccgctctaattagagtatatctctatgatttcagagtttcagctttaaaaaattttaatcactctgcctataactctatgaccagctaatggagtaaataatcattttgaatttctgcaagcagcctttaataatctgaatcagaatcctttaagaattctgaaaccccctcatggtcagacagaataaggacttcttggagtttcagagcagcagagacagatgttaaccaatcagcttgatgtgattgaggatctactatgtacccagtactgtgactggttctctctgtgacagaggtattgattgactgactgattcattcattcatccattcatttaataatcttgtattgagcacttaatatgctcctgatactgttctaaatgaagggcatgtgatagtcacaagacggagaacgtgtcagtcctcattttgccttgtcttggtgaggagataaagctgtttgaccagacactgttcataaacaatgctcaaaagcatttaagaaattgctagactctccaggacagtgcttcccagcgtgagggagatctacaattaaagaagatatcctggaggaggcaaggatcatggtagttttcatagcagctaatttacttgaggggctcagcttgaggaccattcagtgccccaaggggaagtgactcttggaaggagacagtgcagttggatggatgtgcaggtgaagggagttggcgttcctgggtttaagtctggcctcatcattaactcattgggtgatcttgggccatcacctttcctccctgaagctcagtttccttgtggcaaaatgaaaagattacattaaagaagggcttccaaatcttctgttgttgttcttggagaactgccttccaggcaaaactgttgaagacattccaatatataaaatagatacagttagaagagatctatattaaagagggtgaggggccgtatgagcttcaccacccacccagactcttcatccctttggggacaccccaagtcatctttgcagaacttagaacagcatagaaagtttcaaagcagcggactgtatgacaccagaagttctcttctaaccctaaaactccacaagttgtcttgctctacagatcgctccatttagtcagacataggaaagggattgctgttcagaggtattgcctcagttcatttttccaatgtcagtatcaaacaaaaaagatacttgggatgtacttaattcctcaagcaagttgctgaatctttccttcctttcttcattccatttacatctacttggggtataatatggagataatgcagtaaaaaagaaataaaaatccaaaaagtaaataagaaagttatgttccctggagattatgctatatataagaaataaatatgtaaataagaaaaccacagttcctgccataacagggtttatagtcgagagagggagagatactacataagcaaaccaataaataagaatggtaattacccactatgataaatctatgaagaaataaacataattgtgagagacaataataggagggagggcacttcatttattcacttattctgtcagtctcccaacaaatatttcttgagctactgctatccagaaagcaaggggcctcattttggagattttggagatcaaggcaaacactagtatttttctcctgggagcttgcaatttagatggattttcatcttttatagttattaggaaacaaaaataaaagaatataaaaacataaaagacaattatgtgtgtgagtatataaaatatccctagattttgcttttgagactaggtcctattaagcgatctcatgactggcggatccatgcatactcttccttccccctttctaaactgggagtcagaaggtctggatagaaatcaatccctgcaatttatttttaacttctttctccttagccaggattgatttttgtctttgtgatcaatggcacagagaatagctccacagcccaagctgctgtacaagcacttggtctggtcagctccatgtctattgaaaagaacattataagctgattatgaaagtgatataatgaagatgtttaaaggatgggcccgattacccctactttcctggggtggaatgcttacagacagggggctgctgtgagcaagaacctagaactgtcaggaaggcaatgtggcagggcatacggcctgcacccaacagacagagcctggtgaagcagggaagaaggaagggcattggaattagcttcttgtttgccagcctgactccctttctctctttttagcttttctttttcttccttctactatttcatctttactataccaactgctattagatttggaactgcaagcaaacatctgttacaaaaaaatacattaaaaagatcagcttttccctctctgcatttcttgggctttaaaattgtctgattctttaatctccatgctttcctccttctcttctcttgttttcttataatccagcttgtgtttgatgggaacatgaaattagccacttcccacctctccctctagccttgtaacctctcgaggccaggcaagattgcttcctgtttcttctgagaaaaatgttctcggaagagacgtacaccttgtaataatgtgcaggggtaattccacggaatgcaattagaacagaaagtcggctgtacccaaggccttctgtctgattctctggaataaacgctttcagttttactgcctgcccaggtagcgactgtttctagattgcatcaggaagaaatgatcaaagtgctcttaatatgattgtattcattatttcattgtgctacatagtttcttcttaggtgttctttgtctacggacggggtcaggaaggggtggaagagatggcttccttacttcctctgacatatctgccacaagtacttgtgaagttgattgaatgtagctatcctgtacaagaaacactctcattctcactatagttatttttaaagatttgtcctaaaccttcttccctggtttttacctcctggctaattttctttattattgaataacctgtaattcttagagattcaattacattagtagtaacaactgacacgaattaagtggtcagcatgagctaggcttatgaattagtgaatttaattgttattacagcttatgtggtaagtacaactcttctgtttcacagaagaggcactgaaaggttaagccattttcccaagacgacacagccagtaaacaatggagtggagattttgatgtaaccattttggcaccagagccttctttctctgtcactgcatgattctcctccttaaacaagaaatattcagaacaacctacactttcttatttgctggaggcaagttgggtcaggaactgtgtaagggacaatgagtaagtacatagagctttaacacaaagtagctgcttaaaacatgcatgttgcatcactgaatatccacacacacacacacacacacacacacacaaaacaggcagcttagaatctgaagatactgcttgaagaagaccttcggcttaggaaaccaggaccaaggaagtgagtggttgtggacctcaagcgatgtgacgtttctgagtccctactttgtgtcagcagatgttggacctcacatcgtgagtgtggctgtatgtttcaaggtccagaagcacttaaatgattgtcccaaagacatatcataaccaataggtgagggtgggggttggaatccaagtctaggcttggttgctgtgttccttgttagttttcacaacgaaggacaaaataaataacttaaaagatgcataaaaataaaatttctggtagctcagctataactcttgggcattttcttcaagcaaaacttcattcctgctatgaactgcctctgcaaagataaaccaataaataaaattatactaataagagtattgagcagtgtcatatactttttgttaaatatgtcaaatagaaatgaagtagagtgtttgtgtcatgtaacacacagcaaacaaacaaaagtctacacacactcactatttctttccattcccccaaaactacctctcctggtaccaacaactcaccttggcacttctgccctgcaacctctccggcttgactggtaatcttttcttccttcaagttccctccctaccttttctctctgactctccatttgttatgtagaacaattcagccaggtcctggtttctcaaatcttccaaactcaaatccatcatcacatccagcagataaaatgtccttcagtgtttagaacctactctactcttaaggcagtgggagtataagtcacacttatttatagattacatacaacactgtgggtatgtgcacacatatgtgcatgtgtgtatgaatgtcacattgtggagggtggtctaagagaatcgttatgcctgcagtatctggaatctggcaaacatgagtttaaatttcagttcagccctctgctagctgtgtgactttgctgtcttagttgtcccttacttagttgtccccttgtgtcttagttgtccatctacaaaatggagataggatgagggtggattttattgtaattgtagaaggagcatgagaacacactgagtaaattgttgtgcttctgaggaaaggatttttgtagcatcttatcttcactgtgctgagtaccatggcattattactggccttatattgtcatttgtacatcttgtatgttgtttgctttcccaaagagatggtgaactccatgaggtgacagctccatgacccatggtacttaatacagtctggtcacaaaggtactgaaccagtactcgctgattgacaaatgtaagacatagtggaatggtggccggtatccataatgagatttttaaacatgattaacgttcaaggaatgatctaaatttggccagacccttaattattacgtggattcagcagtgggtggggaagaacatcttgtactctgcttccctgtttcctgcaggaaagcaagctcttttatagcccctgattttcgaaggcatggtgttgtcaaccacgcaaaggagtatttgatgtaaaattactacccatttgtaaaagttcatgcaattgtcttttctttgtattttacttattctgactctggaaacacagattttagaagcctagcaaagtgaaaagagcctggagttgcaagtcagaagctttgagcttggctttaagtcttaccttttagtaccaagatgacctcaagcagccttcctaggcctcaggctccttaattttaaaatgaaggtgtaattagacctcacctgcagggttgtgctcagatcaaatgagattcagtacaataatgaaaactaatagcacagagtactcaacaaatattagttgttatgacctgagtactaggtactaagagactattatagatgagtaagaacattatctaccctcaaagatattacagtacagcaagagaccccaaaaggacctgcttccctctaatttggaacaacagctggtaagtgcaacaagcaagccacaaaaaaagagccctgggaatcagaggaagaaaagatgaactccaactgggaaattggggttaggggagcttagttaaggagaaagcttttgacacgagccactgtgaaattcactgatgctgaagtgatctgggtcaggctaagtccctcaaataacttctcctatactagccattctttggaaaggctctggcgtagacactttaggctcattcagggctgcaccatgtagtggtcattgtcagggtttagagacacaagttcaaatccaggctctgccaccatggagctgaatacccgatgcatgtcagttaaattatcagtaaagcaggtttcttggtatttccttcatggggtcattgtgtgcaagagcaggcagtgcatattacatggtaagcatagagcctggccctccaacaatgttgcttgtgctggcagaggacaggagaggcatgacccggagagcatgatggggaagctccaagaagtagcagttggcatttcacaaatattcatggctcttggggaggcagcagtgttttctgagaaacagcttgacagatggcttaaatccgtctactgttgtcccaaaattcactcatgagacatgcaaatcccatgttggtgaaactttgctgttgtatctagcagctcacgtgtatctccaagccttccagaaatcccatgccccaaagaagcgtccctaattctctagaaaatgaatgattttgtttgccttgccctttcaggatatttaatgtattttgaacatgtcaataaaattaattattctctaagcagctatattcacctgtcattcatcccctgtggctgaagatgtttctgttctatagctgtggccatcattttctgcttctccttctcatattatgtattgcctctagcccttccttctgtgcatagttgaagctacatcggcaaatttcagtgccccacgcaatcattaggatgggaatttatggatcaacagcataatttgtcagtgaatacacttctaaaagcttgtgttcctgggaacataccataggtctattataacaatctaatcattgtgtttgtagagcattttctggttacatgaaagcattttattatgttgtttattcacaagaatcttgtgagagaaagataactacaactagttccttttttatctgaaaataacccccaaactgcaagagatgggttacaatgcctaaaattgcacatctaataaatgatggagctgaaaataaaatcacagatgttacaatgtgaaggaacaggaccttccaccttttcccttctcctctctcaccattttgattttattttctgaagtactgggatactatagaaaagaaagaggctagtacctagtttgagtatatttcatttaaataattgacctcatagtgtccacccataaaaaggaattaggccatttgatgtatcaagttgaatgaaaaacttatacaagtattggacaaccatataagctagatctcttgcaatatcttctttaacctcctctcagctccattttctttctcttttctttctttctttctcttttttttttttttttttttttttttacaaaaccctaccaatccacagtccacaaggaacagaaccatttttgagcacagagagggggcaatgttttgatagcaagtttgaacatttctctttagaggtttcatgggcagtgccttccttttctttcacctgaagctctggcgtccttatctataacactgaaagtattagctcttattacattatttgggagtcttcaaatgctcctgaattttggacactaggatgataatgataattcaagttcgtatctgtccttttgtatttctgcccttatctttgcttttttacccactcaaatacacacacacacacacacacacacacaaataggaaagagaaagtgcaaaggacttccattttgaaagctcaggtgagcatcctaagaacttcttcccctccatctaaatcatgaaagccagaacacaaagataagtctcgaagccattaatggtcaagtctcttggagatctctatctgtggtttcctctaggaattcatcttggctgagggcaaggagaatttctatcctttatccctgatcaactgggatcaggtggcacacatggctaccccagcacctcttgaagcctccaggttgcatacataaactgccaccatagtcagtctccagaagacctctaagatgttagactggtgcaggcatttttgcctccagttctgctggctcagataatatgcattgagtacgtgctatgtgccagatgcaaggctaaagctctttctatattgaattatatttgatcctcatgataacttctcagttgatagtactaatatctgttttccatgagagaaaattaggcaggttaaattacttgtacaaggtcaccaaaccagaaagtggtatgagcgggatttaaacacaggtctgagatcccaaataatgtgctctgttacttactatgcaattggaaactgattgagtccagaccctttattgtatttgaaggaacagtgtcagagggtcaggcatgctaattcttcttctagtcttgtgtgtggtctagacccaaactctttgtcccatgcttcctaacccaccccctttctctgccatactagcattaacaaaaggcagtgaagggtacaagaagttgctcggcagggctgctgaaagtggcagttgtgctgtcagtatttattgaccagtgagtgtgctgacaacctcagcatgcatcttcctttcagcatctcccctacacacacacacccagagcaatattggcttcagtgtcaactatcttattatctcatgtctattcttggtgaaactatttgggggctattatgttagggcaccaataaaagattttatgtgcaaatctgtttcaaaggaggctcagccatagtatgatgttgggtaatagacccagtctttctaggcagataaaactgcatcaatattgcagagcctcaaggacataaaatgagcaaacaccagttagacaaacactaaattcaaagtcaaacagtctaacagaggagatgacatgctgataggatgccatgttgttccaaatgctgtaccacactttttattctgactcatagtgtggtccctaggaaagcagtgttggaaaatcagctcaagatggcagaagcaactaattcatccacgcataagactctagggccagactgacatgtatagcaacttcctgatgaaacttgtagctgtttatagactcctatggtccaatatttggaagcctgttttgttttattttgttcttaagataaatatgatctttgaaggaattatggaagtagagagagaaaagccccaaaaagtcaagatttattataaataatatgaactgaattaatgagcaaaggaattagaaaagtcaattgtgcatcgtaacatcttggctgatccttttgtttctttaaagaggaggaaacactgcagaggcagtgtgagaagtaactaagatgtacccttagaggtggtcatttctcttggcttagacagattattcacataatattcgatacagcacaatcctctaactggaaaagcttccacatgtcatttcttattaatacgacagctctcgtgtaagcccaattatggttcgtattcacaaattcccatagcaacaccaagcacttctgtgcgacaatgtagcattgatttctcagaacttggaaattgataggaaccctcacatagaaacatctgccttggccgtgggtgcattagtctgttcttgcattgttataaatacctgagactggggaatttataaagaaaagaggtttgattcgttcatggttttgcaggctgtatgggaagcatgatgcttggcttctagggagacctcaggaaacttacaattacggcggaaggtaaaggaggagcagacacataatatggccagaggagaagcaagagaagagaggggaggtgctacacacttttaaacaaccagatatcacgagaactcactatcgcacggacagtaccaagggaaatggtactaaaccattcatgagacatctgcccccatgatccaatcacctcccaccaggccccacctccaacattggggattatacttcaatctgatatttgggtgtggacacacatccaaactatatcagtgaacatattttctgggaattggaaatgaagtgacatgggacccattcccctccacatagaggtttggaaatttcacatagcctgagggaccagcaaaacctttaaaagtcagataaacttgggttcaaattccagctccaccatttatttgttgtgtatctttgagtatgttatatgattttcctacacctgtttccccacctgtacataaaatagaaggctaacgtgtacacaggaatggttggcatataataaatgctcaaaaatattattaatatctttaccatgtatggtactggtaatgctattaacaataatgatagtaataataattattgttgtggatattaaataatatcatgaaagtaaagcacccaatatagaatataaactcaaaaatatttgcttctgactctcttctaagattacctatgtctacttataaattctagaaacagtttaagttttctcctgtgacagaaataggctcaacttctaaatccccaacgggagctaggaaatgactcaaggccctttggttctaatttttgggggcagatttctgtctttcctccagggcaagccatcatccagaaacaaggataaatgaaaaaataaaggatctgtcaggttaggcttggtcacagcaagagcgggaacaagtcagaagagatagatgtgtttaatggccaatgcatttgtccaaaggaatcattttcactggccaggagcccaattaaacctgtaaaatggaaatccagaaaatcagattaacgaaccagtcattagtaaggaaaagacccagctaattctgtgtttagcatgacggatgggcccagagcaaataattggatgacattcatcaaatataaaataaaaggtgtcaccgaaaggaaaagtggtaataatctttgggatttacaatgccagcaagtttgctagtaaagaagagaaaagttcatcaaaacagattaatagtcactaaactttatttctttcttgtgtgccagagagccacaggatcacagagaagcagaaaatgcatgcatcagcctgcttttaccctaacattgtgaagcagcaaatgcatcagcctgcttttgtgaggactctgcccctgaagggctgtgcgatctttggaaaataaattcctgcttttgtgaggactctgcccctgaaggggtgtgtgatgtatttgaaaataaattcctttgaccatccaggaaccaggcaggagttgagagttcttcactacatctgtgttttagtcagtatccaatggaggaatccaaactcaaagtctttctgcttaagcagattaattccaacaatctgttattcagtaagtgaataaatattgaccccctgctgtgtacctgcctctatgaggtgtgctcactcctggttaaggtttcaggtacagactagagttggagagcccaggtttataagggttcagatgtaggcgagggttagaaagcccaggtttatattctggctgtaacaatgaaaggctatatgatgttgggcaaattagttgctctctctcagcttcagttttctgacctgtatgaaatattctttacatgatagttattattactcttagttttattaccttacttctgctctcctaagaagatattattttcaaaatatagcaccagactagatgcagtggctcatatctacaattccagcactttgggaggctgaggcagaaggctgcttgagcccaggagtggctttggtcactttgagaccagcctgggcaacagagggagacccagtctctacaaaacataaaaaaataaaattagtcaggtatggtggttttgcctgtagtcccagctacttgggaggctgaggtaggaggattgcttgagctgggcaggtcaaggcttcagtgaaccatgattgtaccactgcactctagcctgggtgacagagtgagaccctgtctcacaaaagaaaatttaaaaatacagcccgagtgtcaaaacagattttccgggaatgcaaggaaacaaaaccatagacatgcatgtcaattacagagatttttaaaaagtttttcacaaaagatgttggaatcaagataatctattgtgttattgcagtgaaataagaaagatggacagaggattcttcttagtcacagaaggaggagcacaggcttagagccaaactttctgaggttcagatctgtcttatcttggacaagtcactcaaaacctctgtagagttgttatgaggattaaattaggtaattttcataaaggctatgtgcagttctggagtgtggtagatgtactcaattaatgactgtcttattatttttattattatgtatccgctggtcatctgccagaagatcagctctctcagtccctttctgcttataaaccatggaaatttatttttcacagttctaaaggctggaaagcccaagattaaggcaccagcatgttagatatctagtgaaggcccggtgtctgcttccaagataatgccttgaatactgagtctttacatggcagaaggatagaagggacaaaaaggaaaaaaaaaaaaaaaagaagcctagctagttttctccagcccttttatgaagcacttttcctttcctgaggaagaagccctcatggcctaatcacctcttgaacggccccaactcttaatactgttgcaatggggattaagtttcaacaggaatttaggagaggacagaaacaatcggcccatagcattccatccatggccccacaaatttatgtccttctcacatgcaaaatatgttcgtttcatcccaatagcttcaaatgtgttaatttgttccagcatcaactttaaaatctaggtccaaagtctcatctgcgtatcatcttaataagatgcgggtgagactcaaggagattcatcctgaggcagattcccctccagctgcaagcctgtgaaatcaaacaagttatgtgcctctgaaatacaatggtgggagaggtatgggacagtcattccaatttcaaaagcaagcaaaaggaaggaaggaatgagtaacaagtctcggtgaagtccaaaacccaacagggtaaacaaccttaaatcttgaggcttaagaataattttcttcactccatgtcccaccttccaggccatggggtgaggattgggtctccaaggctctaggggaccctgcacccatggttttgggtaggtatagcacatgtagtagctgtgacagattagagtccatgcagctgcaccagaatgtggcgatcagagacttgaggtagtactggacagacagccccaacattccatgggagcctggctcctcccttcaaattgttttcccctcaaggccctggcactctgggcctgtgatgagcatggcagcctggaagatctctggtatgccttctgggccattgtttcattgatctggtgagtagcatctggctgccttctagctgtactaattttatcaatggtcccttggccacacccttggtgttctctctcaaacttgcctttttaaactttacatggccaggctgagaattttccaaatctttaagttctgtttccctttcaattgtaagctgcctttaattcatgtctctcttcttgcgttttactataaatggtcaaaaaaagccatgcagcactctccacatttgcattgatagttcttccagatatccttgtacaccgcttacaatttctgccttctacaaatctttagacacaggcacgattaagccaagttttttgccgctttatagcaaggatgacctttcctctaatttccaataccttactcctcatttccatctaagacttcaacagcattacctttaccgtctatatttctacaagtattctgttcatgaccaggtaagtaatttctaaggatacttaagttctttctacagctccccacttcttctgaagaagggtcctcaccagaattgcccttaatgcgctgtttaatgcaatatagggttttttttctagtattcacttcaaaactgttcatacacctattcattacctggttccaaaaccactgtcatatttttaggtatttgttatagcaataccaataccaattcagtaccaatttctgtctcagaccatttctgctactatagcaaaattatttagacgacatagtttatttcttacatctgtagaggctgggaagtccatgacaaagacccctgcaggtttgatgtctgatgagggcttggtctttgtttctaagatggtgccttgaacactgtgtcctcacatggcagaagtgatgaaagggaaaaaagagggttagctaattttctctagccctcttataaagcactgatcccttcatgatggcatagtcctcatgtcccagtcatgtcctcaaggccccacctcttaatactgttgcattgaggagtaattttcaacgttcattttggaagggacacaaacattcaaaccacagaaccagcattgtctaggaatgaagtaggtcacaaccttgtaataaactatagaagaataattataggaatgtgtgtgccatgagagtgaatgttgaaagtgctatagaaatgaaaagaacaaagttcagtaattgagagataggagaaattagaatgaattggtagcattcaaaaacccttccatgaactcataggatttacactgaggtttaatgcatcagttggattttggcaagtacggagaaggacacactcaggacaaagggagattggcaggatgaagcttggtatctctgggagatactacagtatcagaggtacttggagaccccagggctctgtggccttcatatagcccctttatgttttggaccattcgacaatgcatttaaacatttaaagtataatttctatcttcattatttactcaagcacaaactttcctgggttgtgtgtgagcttttaagagagtctgtgattgtgcagggctctaatagacatgggaggatgagttctcaaggctgcggggctgatcacgctgtcaaagggaccactctattctcttttggccgttggtgacttggaaaccccaatgctcccagccttgccctggacttctgataggaggtggagtgtgctatcattttgttccctgttgaggcagctggatcttccaaggagaagccccttttaattgatgatctctggccagcattcaggaatgggacttgccttctcggatgctggtctgctttcccatgaatgtgtttggttcagggtaaggttcagggtgacctatagagaggtggttattaagcatatgataggtgaccagatgatatattttgggagtataaaagctttgtcatcaggtataaggactcctttgggggtgatgaaaatgttttagaactaaatagagggtctggctggatcacacactgtgaatgtactaaaagacaccgaattgtacagtttaaaattattagagtatgtgaatttcacctcaaattaaaaaaaaaaccccacctttctcatcattgtaaacacagaattcaggaacatatctacatctgagaggcagggggtcagggcaggtgaggagcacagaggtctatgcaaattgttgttaaaagtctagttatgaggtgttcaaagtgtggttcccagaccagcagcattggcatcacctggaaatttattagaaaattcttgatccccaactcagatctattgaatcagagactctgcagatgggccttagtaatctgtgttttcacaagctttccaggtgattctgatgcatgctgaagtttaaaaactattgatctagtttctgggttagcaagtatgtttacatgtgttggttttctaattaaatgtaaaaccaaattaaacaaatacatacaatcatgtgagaactaatggtgactatgtgttcagatctaaggatgatattttatgcacttgagacttatttggaaaaggaaaaagacttcagagcaacctattgatcttaatatagcaacacccacctctaagccaacacacaacaatatagattcagaacagatgttgtatcaaaataaaaaagttttaaagtcctgaaatacaaggcaagaatgatggtaattagatgtggatgtttctccctgaagatcagggtgaaaaccagtctctcttcttggttcacagcataagcctttgcaccaagtttttccaagtctctgccttcatgctgactctgacatctgctctacctggcagcgtgtggtgcctgctttgtgggcttccgatctgtgcagagcaaggggtagccgtgggagatgtcatctccctccccgagtgaggagagatgggtggcttcagtagagaagttacagctcttctgctcccagtagggcctgtggatggctgtcagatttggatcagactgggaggactggcctgtctccagcctgtgcttggaccttagtgagaatgaagcatgtgccttgggtaattgcctcctcagcgcagcagcctggttgctattgttgtcctgctattttctctgaacaagccatgttatcttctcctgtgaatattaatttcccctgagttaggataattgggcagagagcagccatctgcagagccgtgccatgttggcagggcttttcagcaggccctggccagaggaccatttcttggcgtggtttccactttcctcccattaagaatctatcctttcacaagtgaggttacagggcttgtccctgagccttctagccagagataacagagttcagactcaaacccaggacttctgaatttcaaatttggagttcttcctctaacttttgatgtttttaagtatcttgtacgtggaaagagtcaataaatatctgctcaatacatggatttgtaaatatgaaggaaagaaatctgtgcttagatcagaagtgagattacatttcaaaataatgagagctttgaacaatagtaattattcagatccaggaaaaatacatttgacaattatgttatggttggaatgaattaataaacaattcaaaaagaataaatagatcatgggtgtagcccacattggtagcttctctgtttttagttgaaaatacttactaggtatgtgccatgtgcagagcacagtgaccaaatagagtcagtctctgttctgagggagaatctgccagtgggaaagattgttgtaattgcccacctgtgatctaagcactgtgcagtgggagcaactcagagtgccatgggattagagacccaaagccagcaaggaatattctctaaaaggtaattacaaacccattgtggttgttgatagaagagctaatactttccaacttgtgcatgatctgtggcctcatctgatctctttgtgtttcccccacaatctaggtaacaactagtggaagagccagctactacgtgtcttatcgaagagaggcctttgctcagataaagctgcctaagtactcgttgccaaaggtactgcatgcaccactagcggtcctgggtccctctaggcaaagggagggttggagaggctgctttgttgggctactgggaggttttatctgtttggaaggactgctggcatttagactcactcaccaccaagtcgtttggcctcccttagtggtgcacaacctggattctgtatttctgtctcagctgggtaccagccaagagctttgatttcctgtaactcaaaggtctggtataaccttgggtcatttcccaggggcagtaatgaaaggaacactagctttggaatctcctctgaggggctctcccttttgcaaagggctttatcaccaaatagaaggccaaactcagcaggaggacagacgcataaaagtgcacagataagtctggtggttttattgcttctttctacattttaaggctaaataaaaatgtattgcctatgtttctactccccctgccaccatgagtaattaaaaaggggtaaattaatagaatgttaatatcaaatgttggcattttaactcttctattgaaaaatcataaaacttactttggggaccccattccttgtgaacattggcttctggagggagatggaccttagaacctcagtgtgaaaatggacaggttataattgcatcacttaatgaggctacaaaggagtaaaatctcaggttggacacatatcaggtgtaatgttgcaaagacttgggtctctaagctggtactaaggaacatattatgaaagactaaatgagtacagaggtggaggaattatggcatgagaaagtggataatttcctacccccagttgttattattcattcattaatttatgcatgcgtgtattcattcactcttttatgcatccgttcaactattctttctccatttaacttttcctctgtgaactaaactctatgagtagagtagtgaataaggcacaaatggtccctgtcttcatggatgttatgttctggaaaaaaaagatactgaataagcaacgataggtatgagagtgttacagaagttcaagggccatcttgacataaaaggtggttttagtcaactatgggtagtgagggcagtttcctagaaaaagtgatgtttaagttgatacaagaaaaataaaggagttaattctgcaaacaaagatggggagaagctgatagaaaatatatgcataggctcgattttaagagacagcaccgttcattcaacaaactaggaagccatcttgagagactgggttgcagagaggctgataaggtcagcagagaccattttaagtagcttcaggggcaatgggaaccaatttctcattttatctaccctctctctgatcagagataagctttatgggaccattgtatagtatggtgtttgcaggatgtacccatcagatattctaaacccaaacaggaaagagatattccagcttggagaaggttagaaaggggaaattcacagttatgctctttctaaaggagaatgccccgttacagtaaccagaaggtctcccatgtttctaagcctaggaaatgagtttagggaactttccaagccatctccctgaggtagggattattttgtttctgtatttgtgcatcttttatgtatttttaaccttctcaggaaaaccaaccattcactcccctggacagtgtggctgcaggtggggacaaatgaggccctgaattgatcacaaccctagaacactctgttaatgattagcaaccccgaggcaatttattgtggtggaatgccatccgcttagtcccttttatagagcctcatccagagcagcttctcattaatatgagggctgctgtgaaaatagctggatggttatcgatcccctttattagccagtgctggcccaagttttcatagtcaaagctgaagaggtggggacagagagggtggagggagattggttctttccattgtttaaaaatgaaaatggcttttaagcaagttttgctgttccatgcagtgccgtggatgcttttaggtggcttgcttagaaacaaaggcatgaaaagctccctatcatcattgccctcgcacctctgctcccagcttacatgctcagaatatgctctcctggggtactccatagctttgtagtgtttggcagagaatgaaatgagtgccattaacaatgaggagcattattagaagccatagccttgtgctgagccctccataactcagtccctgggcatcaggttggtgctcttagtccaacaggcatgaaaagcacacagcagcagagggcatggggcaggtgatagggagcaggtaacctagggaaaagacaggtgagcttatgagcagagaccctgagctttcattccagctctaccacttacttatccatgagcccaggtcttcacatctgtgaaatggggttaatattgtttgacagagttgtgaggatttaatgaatggctcattgttagtcaagtgtaaagtgttcgacaaatctaaggaatggttttggtctgggggtaataatactgaggctcttaacctgtcctacatggagatcagtgttcataatgggatcacattccagactggccttggactcaatattgccttaaaccctcactttaccacgctgagcctgatataccctcttttgtctcttagattctggatttattcttaacttactactctaataaattgtttctacaagagaaaatatttttgtttctttctgtatgggattcaggttgaaagtaaaaatgttgatctttgcctgagccttgtgctcctggaaaagagccaaggttaagaaattctgcacccttttgtgtttgggaaatggcttattgcagaccccctctctccatatgacttgacaagattcagacgtctgtcttgtttacctataagaccagattcccattctttttctcatacgtgatttgctaaaatgttgtcctgctggccaatctggacaaaatgcctgctaatttgacttgctcaaacttaaaaccagcttttctctttcctcaagcccctgaactttgacccactcttgagcttgtgtaaccaatgggagctgaagcaagcatggcaatgaggaacagccccccttaacagcccttctgagaatcagctgaccccaaagaaaatttcctgttcaattgctcgatcatgccacctgcacaccctacttttcacacccagttatttctagtttttttttactttttcccataaaagtcattcttttctgccttcacttcaaggtgcttgcaggtattgcaagtcgtttcaaataaaatctcctcttacctaagtctgggttcattttttatttgacagtagaatatggttaattctgttttgaataataaaagagaggaaagggaaatatgtcttagaaaattcattataatgataataacaatgatattaaccttttgtttccttagtttttacatttccccaaatactgatttatccttcactgctgtgtcacggccacacttctcaaaagagttatctgtaattctaatctcttttcttactccctattctctcttcaacctgctgctgtatattctttgcctgtacatccatctatccactatttcactaaaaatcctagccattgctacagtggccacctgcatgccaaatcaaatagatgcctctacatctttattgcttttcaccattctggaacatttgatactgatgaaaataatccatacttgatactcttccctttggtagtttttttttatgatttgtttttgtggatccccttcttaccactctctaaatgttggtgttcctaagttgttcttgtattctgcatggctcctaggtgacttcatccttcactttttttcaatagtggtgactcctatatctacaaccccagcccatatctctccattgaactctagaccacatatccaactgcctatttgatgtagatcctcttaaagatatcccatttaaccaaggttgtaaactaagcttctagtctgcactttatagttcttatatcccatctttcaactatgtttacttatatactccatttgtttcttcaatagtcttttgttggatgtctaccatgtgccagatactctggtgagtattagagataaagtgatacatcagagaacatagtttatgctctttgggatcttctaatgaaagagacagacatcaaacaaataattacataagagactatttaattataattgtaatgagtgctataaaggaaaagaggagtttcataaatcacgttatctgaggcattatatatttgtcctactcccttctcccgctgtagattttacctccttactatctcaccagtctgtctcctgggaacctcatggagaaccggcttccttggttcaggccctcctgagttattatctgaactgttgctgggaccttttaagcctttctccctgcctctagcattgcccctcttaagtcttctcttcacaatgcttccgcaattaatttgatcatgcaaggatccctatcctctctaactaaatctctgtatatatcaattctaatcatgcctttctcttgcttaaaatcttgtgataattttgtgctattctttgggcaaaacttaggtgtgccatagcaccccttatgatgttacccactgtctgcctcacctccttcagagggaaactgcttttatgcgatacagattcccacacatttccttgactgttccatcctcattgtcacctctaagcatttgtactccagtcaccatttttagcacctctatcatagcacttagtcaaatttgagaaaggccactagagtatgtgatgtctccaccatcagaagacaacttcttgagggcaggttttgctttttctctatttccgttgtctgacacatggcagatgcttaataacatgggtatttatataatgaataaagttacattaggcctagattataagaaaatgtttcaacatcagtgaagtattttcaccattgttcacctaggaagtcacaggttttagttttcaaaagcaatcataactctcccaaattattgtcttggcagggcagacatggaatgttatttataattgctttccaaatataaatatgtatgtgattatgtctgatgcttttcaagttccaagtttagtaaagtcccagtctaaatttactcttattgcattttccctccttggatttctctctttaacaccaaagatttccctgcatgttctcaggaccaacaagtaaggcaatgacatatgctatggagctaaactgaggtaactcagtttaagaaataagcttcattattgttcaggtctctattggaccaattttagctaattatgcttttctttttcttgaagactgaatgttctagttattattggttgaccccattcaaccataaagacctatttagacaaaggttatatatttcagagtgtttcaaaaagtgattccctggacttagatgcaccagaatcatctggagggcttgttcagatggaagaatctaagggtctactccagacatactgaattataatttcaggcggtggtcaggattagaggcagccaggtttgctgtatgtgcattttaggttaatgttcttagcacaagtctgcatgctattaagattgataggtcattttgatgcacaccaaagttatatccccactgatacagtgtttagaagttagcttcttggttaagattaggtttaaattaagataaaattgtaggtttatatcttagtaatgttatttattagctttggcaaattaaggaattatcaaacagatatctcagaatcctggataccagagagcaatcttactccagagcctggagcacttgttcaccaggtgacacagccccgggaaagcattaacctaatatgcactcacagcaaacctggctgcctctaatcctgaccatgccctggtgttttaagttgttcttttcccatttcttttacattagtttagtctaaaataacttagctcattcatttttatgaccaaaacatctgggaaaaaccaggcatttctgttgcattttaacagggtaagtgaatttaattcgtatttcctgcagctgtgatttcccctcctactgggttcttcggcattcattccacaccaacacaacacgacttcatcacacggtttttaagagtaagctttttttcccattttcaagcagctcagcaggaacctgtaattctacaaggtgtgtaagcacaaatgagcaagtgaggtcttagtcaaggtgacccagacagttcaaggccagaggctgagatttgacaaagaatcttcaataaaaagatccagaacttgcttttctacttctctcatctccaggttgtccaaatcaaatgggtttactcctttataaatcatcttggaggagctctctgtggtgctgacattacagacattgctgtttctttttacttgaaacggtttctaggaaaggttggtcaaacacagtaaaggctagaccctgcctgattattaagttacagtcaactccactcccccatcatccttttaccagtgctttccatcacagcaacacggttgcctttccttctgctatctattactctttggcatatacaccagtatgtttatgcagtttttaactccttccattttttggcaaatgattatccatgtcctcctgactgtgtaagttctctaggtaagggcttaaatttgtgataatctttgtacagtgcctacctacacaggcaaatgggcttctataaattacttggcattgtaaactactaggtgtgattttagaaatgatccagacagagcaagaccctgtctttaaatttttttttaattaaaaaaataaaaatgatccagtccgggattaaaactaaagtgatgtcaggacccaggaagttaacatcagtatgtaagtggcggaccgtaagaacatatggatatagagggctgagaccctaacttggggtcctgactccatctgaaagaccagagactctggtttttggtacagaatatggccaagctaaacatttgtgattcatatttacttcatgagtcatcagtttgaaatctctaatctagaggtgatatatccagtgactggaaaccatccattatgttggagtcagaccacagaggtttaaaagctggttctgccatttgatagccatataatctgaaacagattgataaacttctgtgtgcctgagtttgctcttcagtaaaatgggaataatcataccacctccctcacaaaattattttcatttttaattgaaaaaatacatttagatggcttagaatagtccccaaagaaatccaacctcttcactaggtgagaaaattgaagttcagagaaactgacacattcagcatcatgcagcttactcacagcagtgcttgtattttgacccagaacattaaattccaggttgagtatccttttctctatatcagtgatcttcaacataatttcattggcagcagaacctcccttaccttttgctcctaaaatattacacagaattccactgtatacaacagatgcaaatattttctgctctgattgaaacaggattgcaggtctagagccccactcattggttatacctccatgccacatttctggcaatcctcatgactctgaagattttaaagaaaactgtgtaaaccaccatactacagaatttaaaaacataaatgaatatctaatgacaagataggctctgtcttcattgcatgtgtgagcttcctttagcaagggtgtctgtctctgttggcactaactcttaaattttaggtataacaataaaaaatgaaagtagatgaatccttgaaagccatgggaaatgatatcaaccaaagcccctaacacccattttgctgtcacttagcaaggaacagaaatcatgaagcttataatttatagccttggttcaacatggaattgtttaacattgcctataactcaagctttttctcagcaatttcataagtcatagtaattacttggcatcccaatgggcagagagatatggagatctgctgccttacaagccttccatcttctttcaggacatgcacatcatcagtacagacgagaaccaagtatttgctgcggtccaagaatggaaccagaacgacacgtacaacctctacatctcagacacgcgtgggatttacttcactctggccatggagaacatcaagagcagcagaggtctaatggggaacatcattattgaattgtatgaggtatgtagccaaaattctccttcccttgggtctgtctctctttttcctgagttttaatggtataaacacaagcactggagttctgggttcagattccagctgtaccacttagcaattgtatgactttgggcaagggacttctatatgcctcaattctagtaaaatagagataaaatatttaccaaggagattattgtgagatgagagatgatggatatactgcatctagtgtagtggctgactcaacaaagttagtattcttgtatgtataaacaattgattactagacagaaattaaggtatttggcctaggtgattttttaagtagctttgtaaactctgtgttgcttttgtggaccctgaatggagggagtggtgctacttatgtgccttaaattatttggaaagtcctgttttatgaacaaattttatgggaaaataaaagcgaatatcagtggtgggaatgagagtttttctaagattccaccagatgccgacatctatgcagggtaaaaaactggccttgacataagtgtgtcacttatattaagcttgttaaaaagtgtgataactaattaaagaataatttactaagaaaccaagtgactccatgtagtaactgtagagagaaagagagaaaaaaagaaactattttcagtgacctaaaagatgtggtaccttttatagtgacagtatgtgacctttgacagtcctggacccagtgaaggaacttgactgaccacctggatatggaggattgagttgagcaatgaaggtgtgtctcattatccaatattcaccagtaaccagtggccacacccatacagactgtgatggttgagatcattcacagaaagagatacgttgtctattctgggtggtggcctcagagctgggtgagctgttcccttgtgggttttcctattgaggagtgggagtggctacatgcatgggtttctactttatagtggtctcctctaagcagtgcctgtcaaaatcccagcagccctaaattggtatctaagttggctactcagttactgagtgataaggtttggttctgtgtccctacccaaatcccatctggaattgtagtccccacgtgttgagggagggacctagtgggaggtgattggatcataggggtagttttcacatactgttctcatgatagtgagtgagttctcacaagagctgatggttttaaagtgtggaacttcctcacttcctctctctctcctgccactatgtaagacataccttgcttcccatttgctttccactgtgattgtaagtttcctgagactttcccagccatgcggaactgtgagtcaatcaaacctcttttcttcatgaatcacccagtctcatagtatctttgtagcagtgtgagaatggactaatacactgagagtggcagaaatatttaagattgcacctgttctgttaggcagagagatgataacataaaggcatggggcaaatgaatgtacattttaaaagaaggagtgaatgtcattcggtagaaaacaaaatcgtagaaataccctgatttcctagagagtaactgacaagtgctgaaataattcccttaaacaacaaggtcccagttttggaaatgttccagattgttttacagaggtgtggagactagtagagatgactaaggggagtaaatacctttgggaagcttacatttctatgcctctaatcataccaggaggcagaaatataactttgttattggacaataagtcacatcttgtttgagggtttggattaatgttcccaggactgaggccattccaagttcctgtttgtacaagtaaagccatagagataagactgtgattcatgtccctgtgatcagacccaaataggggtgggtgggcattgctgcagatgaccttgcagtcaagaaattcttgtgtctctgatcctcttggtacagtgggtgagtttgccactatgcttctcttattctaagaaggggtgcctgaaactccttggtcatttacaacagtgtgacacagtgatatggaatgaggcatgaatcaaaatgaagaatgtgcccagatccatgcaatttttttctttccacttaagttggtcttgtgttttcagtcttattgaagaaaaaaatgcatggtgtcactgcatctatagagaagacataacagacagggcaactttaaaaataaaacagctttcttgatcttgttttccattcaattttagcaggattgatcgcacccctgctttgtgttcaagcccatgaggaaggcaggagagttatgacttagtttttaccttcagagagtttgcaatctagtttgttgggttttgagggggtcaataaacaaagttccttatttacctggtcaatgctggaaccgattaggacagcaacaaagggcaagacaaatggatatcaaacacagctttattgcttttaaaaattatgcacaaggaagtgggattgataatgctgtaccccagaattgaattcatccattcagtcccagacagaaatgataaatcaaagactgtcttatggaagcctgttcctatgacaccgcagcactgatgtaaaaaggatgtgatctgtgcaggcagatccttaaaagaggggcaggggtatggggatgagctgtacatgcgcagttcttcttttcaacgttaccactctgactgtcagtccttttgccctggggaggaaatagtgaagaagaaggaggcattccaaacgtaggaatggaatgagccaaggactgaatggatggtgctgatttgtgagaaagtaagctagccaggctaattgtgtggaataaatgcttgtcagggacaagaatgagggctggataaatagctgaatttcagattctagaaaacatgtaataccaagtgaataaattggaacctgatgttatctagaccatgaccatactgaagatttttagagggtaatgctgttttgcacctggagatacattctgtggtttggagataaagctcaatttaattggtctctaggggtcattagaatttaaccttctttactggaaattctcacagaaactgtgattatgtaccatacggccagttagcaaagagactacaacttttctggactccaagtgcccttgagtaatgcaactgagaaaaacagtaagttttcacattcaattcagctaaattagcacacttttatggagtgtattttgtttgatgatgttaggactggtgcatgagattcataattactggaatgatacaagtgactctattagggtaattatcacagtctaacttgtattagaggtgtgattccaccaggttgtggagttacaaaagaataattctaacttgagtaatttggagagacttatagatgagtttggcttaattatagacaaattgttggaaataagaagagaaccagagtcgaatgagtagggatcctattttatgaaatgttgagtggccttgtggagcagtggggatgaagattgtaaatatactggtaaaaagctgactgaagattcaggcatttatgctatgggctagtatttctttatcttttttcccctcatatttacatacccagaaaatattcgcacgtgtgatgtagtcccttgtgccaggttaatttgtaactttatattagaataggacattacacctgtttccccttgactcaaaggttcagagatgtctttaggtaattttcagatatcaggtagcttgggctgaccttgcccacttaagccacaggtatatcactccatcttctgcatggacctctgaagcttcttcttggtaatggagaggagacaaagaaagcaagaacttatttggaaattccccttgcaagccttggcactgaaaaatccttggaccaatggagatcaaccccactgaactccccaaaatctaacaaggctgagataatttccatttcaaatctgttggagttgtctcctgctgtagagagattctcctgcttgttctttctcaaattcctgcttcaaagtacaatgttgtcatgactataattacataattaggggagaaaataacacttgaaggccaagtaataatctatctcttctttgagatgtcaagccgactccttcaaaacaaggctggtattgacagcgaatgtagcctattgtgtgtacttaccattattctcgtaacactcttttcatatagagctctattgcagtgtcttcacatccccagctataaactacatttctttttaattactctccctaataaatcaagaaacaaatattctttccaacacccgcagttatactatggcagcattctctgagctgccggtgtgatacattttcttcaatgctctcctggatattttgcatctaacttataactccttacaataataaccacagcatacctggcaatgctttagaccagcactgtcaaatacatacataaggtgagctacatacacacttccacatttctgcttcccacattttataaagtaaaaaacaaacagacaaaattaattttaataatattttttatttaaacaaagtatctaaaatgtcatttcagtatacgttcaatgtaaacaattatttagttattttatatttttccatactaattttcataataagtctgcaaaatcctggatgtattttacatgtcccatgaatctcaatttatatgctaaattttcaccagaaatacttgatcggtatttaacatttcataaatttacagtaaaaaaagaagattcacatacccaagttattctcaacaaacttaaaagtttgccaataactgaaatgggtatcagttcttcaattcaaatttctatgggttaaaatgaaataaaattaaaaattagtttcttcgttcccgtagccacatttcaagccatatgtggccagtggctactgttttggattgcacagtcgtaaacaacttatatatttttttcttatttatctctcacaatatcacattcttcattgtgcctgtgagattacagagatgcagagaatttagtggcttggctctgatcacacagctagtggtgctacattttcaagaaatccacgtctgcttgacaaaccacttaggcttttctcactattaatttttttttgcatttttatggaggtataatttatgtatagtaaaatttacccttttagtataagttctgtgagttttgatttgtgcattctggtgtgtaaattgtgcacaaatcacaatcaagacatagaacagttccattaccccaaatattcccttattgcccttttgtagtccacccttctctaccccaaagtcaccgacaaacacatacctgccctctctttgtctttagttttgcctttcctagagggtgagtaaatggaattatacagtaggtaaccttttcagtctgacttttttttgcttagaataatgcatttgagattcacccacattgttgaatatattggttccttctgtttctgagcagcattctgttgtgtgatgtgacagaggttgtttttcaatcaccagctgaagaccatttaggttactttttaaaattttgtgtgattatgaataaaatatctataaacattctcttgaccataaatttttatttctcatgggtaaatacttaggagtaggattgctgagttgaatgtaagtatatgtttataagaagccaccaaattattccaaaagtggctgtgggattttgcatttccaccagcaaggtatgagagtagcagttgcttcatatcttcagcaacacttgcttggtttgacagagagagaggagagagagagagagtgtgtgtgtatgtgtgtgtgtgtgtgtgtgtgtgtgtgtttgtagctgttccgatggggatttagtggtaactcatcgcaggtgtgatttgcttttcttcagtgactaaataactggacccagtatacctggatggataaaatgaaacttcgaggctgggcgcggtggctcacacctgtaatcccagcactttgggagacccaggcgggcgaatcatgaggtcaggattttgagaccagcctggccaacatggtgaaaccccatctctactaaaaatacaaaaaaataactgggcatagtgacagtcacctataatcccagccactcaggaggctgaggcaggagaattgcctgaacccaggaggcagaggttgcaatgagctgagatggtgccactgcactctagcccaggtgactgagtgagactccatctgaaaaaaaaaaaaaaaaaaagaaacttcccatccagcctcagtattctggtctctttgcccatcttattgatgtttccttgcctttcctctccctagagcctgtcatcttccctctgctttatcaggaccttcagtgacctttatcgggccagaaggacagctgcttagagactccacagggtcttttttccctgaaccaaccttcctcagcccctcaccacaggtgggactctagggacagcccaaggcagatcatggtaattgcttttctcagcagagccctggcttctttgtcctgaggtctctgggaggtgaccaacagatgaccatgccacctggactcagcattccgccaaggggcctgctgtcagtttccctctgcactcaaattgattcccagagggaaagtgggccacacaggctagacaccttgtattgttctcttccgtgggcaccatcacaagctgttacccttctccctggactgctgaaataatcagcagcagccaaacatctgatttcaaacaacagtgggtggaagtatgtttaaagttaattcaatgctttgtagctccttggatgaggatgagtaaaaacgcatgtctcattctccaattcctttacattgcatttagtgagggtgcgtagtcttcataatacttttgtcttagaaatatatgtgtacatacatgtgtacacatacatgcatatatgggtatgagtctactgggttgcaacataaatgtatttcttacttgggttgcagtcaaaaagtgtgaaagctgttggcttaggacacacaaaagccaagtgccttccaaactcgcagtccatttatacaagacatgaagccaaaaaagtgattcagtaataatgtaagggctttgaactatccaaacacaagtgggaaatgttccgtttgtttcagacgggaaggagattgctgcggcattatgtacaactgcaggagaagcatcctcacagctgcaagtgggttccctgggagtctgtcctttctacatctttttagtccccattcccctggttttgttctcagaatatgtgggacacacagaaaatgcccgtccaaatggtgaagtgctcagtcggaaaacatggtaatggtaatggtaatgattctttaatttgttaacctgctcacctggaagatcacaagaggttgctgagtggctggaattctttctgtgatgcattgagctgggggcatcagagggggccacagccgctccccaggaaaaactgaaccggggtcaaggtgtctgagtctgatccaaatattttcatccaagaagtggatagcaaggccctgggtacttgtgggagagggtaactggtttaggggagtgagtcctctggaatcattaggtggtggtctagcagaaaaggcaccagctctgtggctaaacagaacactgaaaggcctccatcaggtagaaggttctagagaatcccagattccattctctgtgaggaatgattagtagtcaggtttaggagatgcacctttgcagttggttttaaagactgaggtgatctgaggggctcatagtccctagatgagcatttgagatgctgtccttcctgaaatggccctgactttaagccattagggcaaagaggaggtctctagggagggcatggctcagacatcatgcccctgccctaccttggtttctctgcttacctacccactgttccaggtagcaatctaatcaattccattgttggccctttgtcaaattcccctggtggtgtccttccagttaattctattctcctcctgagattctctgtccatttgtttgtttgtttattcttatttgggctggcattctctttcaagaccaatcaggttacttaaaaaaagaagagaagactttttatttcgtcaattaaattatgtcatttgaaaacaaaaaaataagctcacttctgtgaaactcttaccattttctcccactggggcattctctccgaagtgagtaaacctcagttaaccatgatactggaagaatgggggataaatacaattaaaactttaagatatctgagtatcacccacaaaacctgccattgaacctattgtttatatatatttaaactaatttaattgcctttggcaatatgctatttgctatttgcctttgaaacatgctataacttctatggaaaaagagttaagggaatctttctttgatgcaggatgttgtcattataagtatctgctttccttgcccagcatatagaatataaggaataaaagtttgagtagaatttgtgcttaccctagaacccttctgggtgataaatctcctttaatcctctagcggcttgttttgtggtgatgctcttttcccgtcaaaatatcaaaggcgtgcaaatctcaaaacatgggaacactggtgagtgctttgcatagtctcatggatcctttgccagccaactgggaaaaagaagaggaatagggcttattccaccaatttcaaagcgaccattggctgagtcccacagatgatatgggagttatccaaagtcacatagtgagctagtggcatggaaagagacagatgccaggcctccaagctggatcatctgccccaggatatcttcattactactaatcacaatgcctcaacttccattgttatgaaatacccatctacaggcctcttctgagcagaaaaacatgtttgctggaaggggtaactccttcagttcttgtcagccactcccatctcagagggaatgttaatagttaattaaaggtaaagtcctatggaacaaagtacagagacgagcaaactgggaaaaaaacagatgggtaagcatagaaagggacatctagggggtgacataaggttcagagatgaactttttaaacatttttcagagaccacatggcattcaacgtttcctatcatgttccttcttttcttgcttggaaccccaacatgccgtgggaaattctgcggcttctctaagggcttctccaagaccaaaggcatgttggcccagcatggttctccatctctcaccttttttcctaggtagcaggtatcaaagggatatttctggcaaacaagaaggtggacgaccaggtgaagacatacatcacttacaacaaaggcagggattggcgcctgctgcaagctccggatgtggacctgagaggaagcccagtgcactgcctgctggtcagtcactcagcctcatgggaagttcacagggcaggctggccacctgcagaagctgtgtcgagggctttgtttcgtcaaagggtcttaggaactcaggtggtgcagagcagtaattttctaaaacttgcagggcattggtgtgtggactcagagtgcagcaccaattgggtgaaaggcccagttgaattatgcaggcatttaatgaggatctactatgtgctccatctcatagtaaggcaaataaacatataagagaaggagcctgtactcaagggtcccaggcacagctcagtagtagtaatacatctattaactgatactaacatgatgcattgtgttttggtaaatgcttgctagatgttgaggcaagcaaaagttgctttgagaatccagggggagcttaggctggaatgtccatatgggacagttaatctatcagcatttccaggattcctgttgtatgggatattggggtaggcaccatggaagacatgatgtgtgagatggtatctctggctccaggtgcttctgctctgtgtgaggaggcaagaggcttcattaacaataaaatccacaatcttcagtgccctctgaataaggactgctgtaagaaacaattctaaggtcccagaaatggttatgtttcttctgagcaaaaagtttcctcttgccacttattcagaaagatttattaaccacttatcttattctagaccctatgttaaaaattgggactacaatggtaaatacagcaaatagcgctctttccctttgtaattttcagccttattccatataatttttgcttcaggtactaggagggtcagagagaaatgcctgcttacctctaggaattggtcacagcatgcattttttttttcctcaaaccttgcccatggcttcatcttattttaatctgattttctctttctttctatttcttcatcttcttatttgtatttgttgtacagaatatgtctctgtaaatccccaagcccttttaagaacactccaatggggatagatgaataaataaatgaataaatagagaacacagacttatataggttttagatgatggcttcaaatattttaagtaaaattataagtaagaacaaaatatataaaacagagacagagacaatctggctgaagaaggtggagggcctggcctagttcacatagcttccactcttcactcctcccagagggcccttacaactccaagaagcagaattgatggtcaagatcagaaatgcgagaatgttagtgtcatcctggtagaaggaatggtcaaggaggcttcataaagccagccatgaactggaacttggataggttgggtgaggaagagagggaaaggcacgagattgtggttggggggcagaggcaggagggggtttatggaaggtactcagtggagcttctaatgtgagcataccagctatctcaggtgcggatatctcctgcccaaaactgtgtgactcaccatccaatgccttgctatttctgggagctgaacatcgggaagcccatctctagtggggcaggggtacaggtgtctggaatttcctagaatgaaactatttctttctccattttagcccttctgttccttacatctgcacctgcaactctctgaaaatccatattcctcaggaagaatctctagcaaggagacagccccaggacttgtggtggctacaggtaagaaaaacattccctgtgcttcttccttactgagagtgtctagaataaatttgtcacctctttttggatcatggactcacttgagcatcagatgaaagctgtgagcactcgccccagaaaatatgcagggttcctcaatacccatctaagaacctaacatgcaaagagctccagacatttgtaattcctaggctcatgcatcttccccccagacacagagcagtcccctgtgcttaggaagaggccagagtttctctcaaagtaaactgaccaatcagaatggttgtttgtaatagggaatccacactttaagaaaacatgatatatgaacttcctagctcaccagatgtaagttggggtagttttctctttgaacagatgattctttacaaagggttccatcccagagctgtttttaatcaggtgcatgtaaaggcttgtttacacatggttaaccccttggctgagagcctgagggcaaagggcagaaaaacttaaggttgcattgttggaatcactgtccactgagcatcagtcagagatgaagataaagcaactctgagatgaaagctaaagtctccggggagtatgctctgattagcatgcactgcatttccatacaccttttcaagaatacattgatggcataaaggaaggcagcctgctaatcttagaagttagagctccggtgttggtcagcttatttttctaatgaaagcagataaattcacagtgactttcggagctggtacattctgttttctctcatcaacccaaagctctggtccctggagttcctactctctaggcatggcttccttctccaagcctccaactgtgtgagcttttagataccaccagtgatgaaccactctcatcagattgacagctggcatagccttctggcatgttagtcaactcctgtcaaccccagatggttgacaccacagtggtattaagcaagcccactatgcttaataccactggcttcagggagcccaggctgaggagagatgaaggcaggctcagttgctgttcccctagctggagaagtgatcctcacactctgcaatccatgtggattggtttttccaactcaagggctgcgggaccctatgcctctcctcaagacctacaggaggtctgaactggaagctacatcaaaaagtagggatgaatgataaaagttaatattatctgaatatttagtgtgtagccaggcattgttctttgtgggttgaccactctgaacttcagtgttttcattggcaaagtgggcataatagtaccaaaataatagaattgcaggatataatgaaacaatgaatttaaaatgcttagaacaatggccaggcgcagtggttcatgcctgtaattccagcatgttgggaggccgaggcaggtggatcacctgaggtcaggagtttgagaccagcctggacaacatggtgaaaccccgtctctaccaaaaatacaaaaattaaccaggtgtggtggtgcatgcctgtagtcccacctactagggaggctgaggcagtagtattgcttgaacccaggaggcagaggttgcagtgagccaaggtggtgccactgcactccagcctgggtgacacagtgagactctggctcaataaataataaataaatgaataaaatgcttagaacagtgcctggggcatattgaatactcactatgtgttacttatcatcattaatgttatagaagttaaaactcttcttacatcagaagaatataatgtgctcatctccttcaataaatccataaatccgatgcatgcactatgcacacagagaaactcaggaaacttgtcctcctgctttccaggctgagccctgacacttattaggtttgtgcatttggcttagtttttaaactctgagcttcatttttctcatctgtaaaactgtgggggtgttgtaaaaattagagatggaagtatgtgtctataagacccagcagagtgcacagagcatcataaggtagtattaatggtagttgttattacctgtgaccagcatattgcttctaaattagtactttgtaaattagcaaacacacagacattaaagatttatttttgaatttttttgtcccatatgtatcagaattgctaatttctttttatctccccttgtaattcttgaggctttttgccatgccctggatctttgggagggatataactcagctgatgagatcctgatgaaaagccagggctaagtcactggcgcgtgcctcttcatacccagcttctccttaccctgcttgccctggacaccttgggaggttatttgccatcaggaagataactatgacgtcagccaattatgccttcagtggcctgcatggagcctgcccctgcagggtcctttcccatatccatgccttccacctgcccttcaggtgtcagtcaccctgggctctctccactcccactgctgactcccttttcccactttgcactgagatgtggtctcagggaagctgcgtggataaaagtataccctgggattcatctcttaactcctggttgaggacatctccgaaggcagatggaaatctagtatagagagtttggcaattgccttttgcaagcagaaacactagggttcctaatatccttaacactgtggtttcaagctagtaataaagacctcacatccttgcagtgccttacagcatccaaagcttgcttttcttgccttgattgcataactgcacgatgatgtagaaatggcaattactatactcctcaatttagagatgaagagactgtgggcaggtggaaacaggtgtcatgtcccagcccacaatctctctgattccacctctagtactctgttctgtagcccttcagccagacccgtctctgagcccctttccgtgccagctccacagctaaccagaccccctgccaaacttcctgtaaactctgaatgttcacaccctcctattgttctttctgtggaggccctcctcccgcccctgcccctgcaggggcaagttgcttgtatactgtcagcttcctccccaactgagcctgtagccaccctgtatgggcagcaactccctctggcatgagtggtggtgagagaagcgtagctagccctcagaggacttcaatattctctcccttttattttatttttttaatatttaaggagcagagaaggatagcactgggaggaaatgagggtgaaagcaagttgtttaaaacttccaaaaagggcaatgggccctccatcatttaccagcaaagctgttggtgagaaaagatcccagttcttcttctccatctcactctccctcctctctcatcataccactcaagtgggcaacagctgcatccccttcttccaacatggttggcagccactctagctgagctccaattccacttcagccagcaaggctcatttttcaaatcctccttctctgacaccataactccggctcttcctatcagaaatcacccacagagccacctaaggactgtacatgttcaaagatcaactcctcctgggtacatcttttctgtcccttcatctgggaaccaactttctggtctctgtgatccgtaacattttctttcagaggtctcttcaattgacagaagatatttccacaaatagagttcactgtgagccttgggttcttaccaccataaggcccccaaaatccatctagtcgagctttgaaagagaggctaaagatgttgacagaaccagcttctaaggaaggtgagggatgataagctagatccttagaagccatgccagggatggaagatacacagctctggagcaacagtgctcctgcctccctctttctctgtcacccttggtagacatctgttgatcaccaccacattctattctgtcaaaaccaaagaatccttcttaacacaatgctccaggttagcacaaccactaagcgactcgagttgatattctcctccccatttccctttactttccttacctgtgtcttctaaaacctgtatctggggagttgaattccaaattccagacagaactccatggatctactcaccaagcctctccctactcctcccacacctactgcctgaaccctgagccctgagcccaggggttatttttgaaatcttgagtctcaaaacaagttggctatctgtgtgcttcctgatgctgatggaagcttgacaagctgtagcctggctttaatttctcatcttgaagcattaaatgtcaggagctcaattaacattttcattattgcatttttgttgtgctcctatttaggctacagatgtgtgggagctaacattctcttcctgctatttttaaagaaaaaatatcagccagtaagataaactcttacatgtttagggttccttcctggttgtcagaacttcctcaagtgcacatcaacattggaacatgatccaatcatttgttttcccattcattcattccacaattatttattgagcactattaggttgggggcctcttttaggctgtgagaagagggctgctcattgggaaaacgaaatcaatatagatggactagaaaagcttgaccactttctttttaataagcatagccacaaggtgatggagtgccaggggaagaaaaagaagggcagagaggagagtgtgaagggatggaagcagcaagtatggttggtctaggcataagccaggtgacttgttttgctgccatgcttgatggccatggtatgctgagtgtggtcatcttcttctgggcaccgtataatttaggttacataatctgtaccattgggtcactcaactgcctggcactcaaaggacattctgacaagtttcaaacatacacacagacacacagttacgcacatacacacacacacacacacacacacacacacacacacaccagtttttctcaggctcctatgccagatttctccatatgtgtctactcttccactctttgcttccttcaggggacacctgtcaggagcaatgtgagagattattggtatacagactgaataattcaagagacctggactaatcgatattgtctttgactcatgacattgaatgatgcatttctgtcatactatttagattttttcccatattgggtttttcatcctgctgggcttttgatatgacaccagaaaagaaactgcacaaattagctgtaaatatcacttagaaaacctttactctctgctcccccatccctcagccctaagcacacttaattggtaaactcctgacaatctcaaatgatctgcttatgtttcaggcaacattggcccggagctctcatatactgatattggtgtgttcatctcctccgatgggggcaacacatggagacaggtaactgggtgaattgacaaaaagggaggaggcatttagagtaagttctaccaatctctctctccatcctatagattctcagcctcattatgactttgtaatttcaaaacatttgaagcagctgttcagtttggtcaatttggctggcaggttagaggggtaatggggtataatgagaagggcattgggcagggaataggaggaactggaattttcccagttcacttattctttccttcagccatatgtatgtaacaggtccagatgctaagtactgtgctggttgctggggatacaactgatgaaactgtttttatcattagtgtgccaagagttcttggcaagctggtctcttcacctttggggatgtgtttctgtatctacaaaatgcaaggattggaacattaaaactgacaaagccatggaagtcagtggttgtttaagtattgtatagactgtcttgagtaagtatgaaacagcttatatgcttatatatgagtaagtatgaaacagatatatgactgcatgaaatgttaattcagttttacaaacacttacagcaatgctgtccaatagaatgttcagcgatgatggaaaagttctgtatctgtgcttgtccatgcagctatggagcacttgaaatatgactactgtgtcagaggaacttaacttttaattttatttattttaattaatttaaatttaaatactctcttatggctactatattggacaaatagacttatacagtgtcaactaggtgtcaggctccaggaggtaattgaatactttggagtccctttccttaaaaagctcaaaattaaataggagaaatgggttcgtagctagataactataattcagggtgataataatattttagtggcattattagcatacaaagaaaagagacgaattgatcctgctggagaaaccaggaaagacatcacaaggaggggaggcattttactaagtcttaaaagtgagacagtttctccgtggagaagacaagagaaagacaatgaatatcttgttagacaagttcctgtttggatcccttagtgaagattgtcatcaccaccatcatcatcatccccattgcctccagtgtcagcactaccagcgttgtaaaaattaacaagtacttacgagacaaaagcaactatgtcaagtactgcaaggcacacagtcaataataagttaaggttcctacccacaaggccataatcaggtggctggggagcagatacataaataagatcatacccttcaaaatgtaaaataacctattacgagagccaaaggagggtggaagctggaatacaaactcatctggtaaaaaaaatctcctcataggcaaaccatttctggagatctctctacctcaagaagtagctcacttgaccaacgttgtcactactttttctttcctcctttcataaacagctaaggaatccactttttcactccagtactagacagggcaaaaatgagcagtggccagatggtaaaattaagaggaaaggataaggataacttctccctcctccccagtgcctcttcctatgttcctcattcttagggttcaacccagcatctccattatgtggcttatcacagaaccatcctttaagctctggagagaaaagcctaacattgcagactcagagtctatgtttatatctggaatataagtgaatcacccttaggtcctttgtgcattggggctcatcattaatagggacatttttcttttctttgaagataaatatgtaaaaaaagaggtttaggactgagaaactacttttctctctaaggttccctggggcatatatataggaggccccattcctcttacacattcaccccttaaatctgactgtatcgtctccttatcctcttctagccctcttcacttaacccaccatcccaacttctccatctaggctgcatgaaccaccatcagtggttaagtgctgtaggaattctccaagcatactttcccctagaagatctacagtcgagattagttctctgctggagaaatagttttcctgtttaaggttggagatataaaagtcatatctggtataagcattgatatatgtgggcttaggtctgaaattctcttaactcggaaccttgtattgaagtcagtgcttagaaaatgcctatgggtagatggagggatggatggttggatggaatactgaataagggaatgaatgagtgaatggatggataagtaacagacaaatagatgaaataaagaatgaataacgttaggtccctggaagtactgtgtttcaatgaccacttagagtagggattcatagacacccaacatgggtcttcatccaacttgcagggaggtggtggctatttcaattattagttttaccatagtgggtaggaaattgtcttttaagttcctagataatgtataaacaacactataaaacacagactattgacaaattagcaaacatctgaatagatgaggaagaagagaaggctgagtagtaacttaattagctggaaagatagggaagtttcttcaaagtcatacttccgttgggttacctagttgagcatgcaccttgttgcttcaccttcatgtagcatgctggttcacagtactagtagtggaaagagccctggaaatgcaatttgagtggcctagggacagttatttgttttctgtgagcccatttcctcatcaatcaaatggagataatacttgcaaaaactatctgatagtgctgttggaaggctcagaacctagatgaaacaatatatgtgaaagactgtaaactgttaagcactatgcaaatgtaaggtgttgctatgattgttgttgttgttgttgttgttccagatctttgatgaagagtacaatgtctggttcctagactggggtggtgccctcgtggccatgaaacacacacctctgccagtcaggcatttgtggtaaggagagctccctaccctattaatgagctaatgagcagctttttagtggagaggattgtgatgagttattctgcatggttttgtacccatttgtacatttcctcatccatttatttatccatccatccatttaatagcctttacatcatctaactcataagcagcaatagtaggccagataattcagatggggaggtgtaatgaatggggtgggtggtaatgagtggtcagataaggcagaagacagcaggaaggacctgcagttcaagtagccaagatcagtaatccaaaataggagagatggaaattggaagaggagggttaggtacatgtaacagatactgagttcagttctagagaagttgagttagtggtttctatgaatatttcagcagaaatggccatgagttgtcagatatattcatctgaagttcgggaatggtctaggctgacactttagctttgaagtcattaaccactaggtggtagttaaagctatggtagtgggctcaatgcctcaagagagtgggtacaaggagaaaccagggactcctatggactctgctgaaaaccaatattcagatggcaggaagaaattatgggacggactaaagagaaatggccaaaatatagaaactaaggggaaatattttcatgaatgctgaagaaaggggtgattaatagcatcaaattctacaatcagatcaagtcagttatggaataaaaaacaacctaggattaagcaataaaggaggtttttcatgatttttgtcagagtagaattgaaacagaggtggggatgaaagttagactataatagatttataaacgaatgagctactgaatggatgataagcaatgaaatgaaatagagacagtatagattattcctttcaaagagtaagattatgaaatggagctgacagtgtatatgcaagaccttccacaaggacagagttgaatgagaatagatgatgatgatgatgacgacgatgacaacgatgacgacaacttgttgctgttgttgttttgtgtttttggaagggaatggatgagtctcatttgtatttatgccctgaagggaaagaatttcacgcttcagattcagcaaagtgaatatttggaagagtgaatatttgtgggtggagaatatcctatctagagtacagttggtcggattcacatgggcagcaaggtggaccctagcctaactaccaggtcttagatattgggagataaacaagtttagagtaagaattttactggaaagcatcggactgtaatcaggaaaggcttagaattccctaatgccaaatccaagcttcagtccttttggcaaggacttaagaaggattctctcaatttgaccattttaagtgaaaccgtatgaaatcgccatttttaggtcaaaaatgatcaaatattaccagtttcttaaagcttaacctagcttatagtgaaatagttctaccactatgatatggagagattgtgcatataaatgttgaaaagatgcatggagccatttgtaagaggagcgctctcccacctcaaggatgagcttgtaaaagttcccagtgtaattgtttcttatccttttactactgatttatatagttttttggtagtatccaaagactagaattgcttgatattaatgatagtcagtatttattaagggactttccaggcactgttctaaaccatttacatgaattatctcatttaatgcttgcccaacctatgtatgtaggtacctttttatcacccacttataatggcatcaaaaagcaaacatgttaaatacctttctcaaggctagacatgtatacctggcagcaccaagttcgatttctgtcatggatgctcttctgttctggctgctaattttctatatactataacaagtacacctaggcttatgacatagtccctgccctccaggagactatactcaagataaggtgtttaggcagtacatgtgtgactagaagtgaaagcaatgtctgctaaaggatgccagctgtgtgtattgctggaatactgaagcctggtgtgtaaggagcctggcatccttctctcaaagttcagccctcatgtcatctcctgcagcaggtgatgtgagggctgacctttgagagagggatactaggatttacaggagaggtgagaggcaagccagggaaagaagaaactttgaccgaagtccagaattcaagtaatgtagggagtgttcagggtactatttgattgagaccaaaaatgtaaatagaggtgggtaggactcagacgaacttacatgccagtttaagggattaaagttggtctggtaggtaattttttctgctaacaaaacccatctgcctctgtagaggaaagagctatctctattgtggactgagtaggacttgcactctcagagaagacagcttgagtcttaaaacaagcttgtttttaaaccaagcaaggcaatgtttcttagctcccatcatgttaaaaacttccatctaaatcttcataagagagttgataaatgtcctacagacagacttagctggcctggtttcttccctataagtcctggagaagaggctagcaaccgacccttaaacttggccatcactctccttgattgtggtagggacctagcatgcacttaatcattgattcttaaaagcattctgcagaagtttccttgtgctgaggaaagaaagagtttatttttgtcatttccttttggtggtagaagagaagagcatatttgacatggcaagagtacatggaagagagtgttggttttgtcaaatattggcatccttacatctaaccgtccagtctgatccacaaaagtttatctccaaagactgcctcacttccaaacggagtacttgtctgattatgcctggaaggaaaccatccaagttgggaaaattactcaatattcatttagggatatttatgtaggaccaaatcatgactctcaaagtcatcactactaagtttgagttttcccttgttcaatgtaatatatctcttttcttggtaaaaatgtttatagagttcagaaaaaaaaaagaactgcactgccactgaatttcctcttataataacaatgataatatcaccctccatttgtttggctgttctaacttacaaagtattaagaatgatttttcaaactaagcttttgaaatggcattatcccatttataggatgttgatactgccatttgtcataaatgctacaaatgttttcttgaacatgacagagaccatgatttttgcttacttgcctttctatgaatgccattctctaaagcaatccctcgaaggggttaaatgccagctgttgagtatatgtgttagaaaacaacagcaacaacaaccaactcatttgggaattatcctttgcactcctctttcaaaggctaagtgagtgttttgtaagggcttgacaatgttattatcatcaatgttttcttatgaaattgttgactgatcttgtctcctgcttgtgagatacaagcttctgaaacttaagccagctttttcttcactaggagcttctaattaagtgacaaccctcaaggtaaacaaagctcattttaagaggaagataggttaggtaatcagttcattgccattttctgtcatagatctcagactgacattgttttatatacagatgtatgtatattaatatttgaataggaaaaagacaccagattacccactgggatgtagtggctctcagatttaaataatagctacatcacctttaagagaaaataagagtaataattgaaaagctggggaaactttagctaggctaactaggcatgttgtttcctacaaattgaaatgataggtagccagataggcgtgaacgcaaaacagcatacaaatgaatccatctgtttgtgaccatgtacttttggatgcattgagattagaactaagtgctatttcagggaaaccctccatctcctttgtacctgagaagcattagagtgagataaacaatgggcccccactgaatagagagatctgatgaaaactcacaatcggcagagcacctaatgggcaggtagacgagggtgtgactgtttgcttagccctgacaagctgtcagtgtctctcaatgggatgttcttggaaacagaaaggaaaacatcacctggccttttgtgtttctttggttgtttgtgctagcattttgttcagagaaactttcaaatgaaaacaatagttccaaacaatacatgtctctgaaaagcaaaagtgcatgtactgttctgaagaacttccaggtggctaaaatgctaccacctcatgtactggggataaaatgaaatggagcaatacaccttaccagagggaggaacattgattctcaatgaccactgtagctctctatttctgtgctagagacttctgaggaggattctgattgttattggcagattctattccttttagtttatgtcatgttagtatcatagtcatagacacctgaagtaggaaaaggtcttatagaagtcctttaaactagtattatacctggtgtagctgatagttttgtgacacccccaaaaagttacctcactttaccagaatatcacagtgctaattgacctgcaaatgcccaccttacgtagttcccatcttgtataatggctttagttgttagaaagattgtttttcatgctgagcaatagtaaatctacttgtaatctctgtgcattgacctgtaatctgccactcagatctatgcagaataagcctgctacagagttacgtatgatttttagaaaagtacagctgggaaggacctcaatgtatttcttagaaataccttaggctagaaaagcctttttaagttctgggaaatgacatgatatgcaactcaagacagattttattcatttgttcatttattgcatacatatttgttgagcatatgttatttatctagcgttagaataggggttgggatacactgttgaatggtagtgtgtacttgggaacttatattcttatccacaaatatttgactgttctctttagaagggtcacatggaaatctttattctatctgtatgttattcccttattctatctgtatgttaaataattaatagttccacctatctaactacattctgtctaatttccttcactgacattatccctttctggtagtcgataaatagccctttaaaatatttggaaactttctcatttacaaaaattaagatgcaatggtaattaattcagtttttcttcttctttttccctaagctgcctaaaattcatataacctgtttctagaaccatttgctttttacctttaattactcttattgtcagtttttctacacttattaaaattgaacatagtatttaggattgggtagaaggatgatttcttttcttatgcttgtaatatatctgtgagcacatcctacactcacggtggcttgattacctctcatgatagtggcattgccagaaaatatttaacttgtagttgacaaatgactccagtttctttccagctttatatattttattagctaatttcatttctctagtggtaggtcttggtgtttttgttttttttgtattaagtattctgctttaagttgtttctgtcttataaatgacttccaaatttacatccctaattatgatgagaaatctagatccatccatcaaaaggtcttcttaacaatattacagtatggaagtccaaaaagcatcaatcttgacatggaccaaaacagaaacaaacagatgttaaacaaaaattagctgggtgtggtggtaagcgcctgtagtcccagcttctcaggaggctgaggcaggataatcgcttgaacccaggaggcagagattgcagtgagccgagatcgactcactgtactccagcctggcaacagagcgagactctgtctcaaaaacacaaaaaaacaacaacaaaaaaagaaagaaaccaaaaaaactgcttcttctgttcttctaatttccccctcaattgtttaacactcccccaaatcaatattttccatgacttctttcttttgctcatgcaacctctatatattttgttaccaaattcattgacttcatctctaaaaataacctaaatatttccattttttttccactattaataatcttcatccaagccccatcttggtgtggtctcttaaattaccacccctccccaactcatttccttgaatccactttgggtgttgacaatccgtttatcacagagaagtgaaacttgtcttttaaagcttaaatcaaattatattatttcaactgaaaataaggtccttcatgatttgacttctgccttattttcttctactaattctttcaactaatcccttttcacactaagctacagccactgaccatctttctgttcttctcacagggcagctttttcatattagacctttcctctgtaatggttttctcctgaatctttacatggatacttccacttatcatttagatttcagtgtaaatgtcacctacatagaaagggctttcttaaatttttagtagaaagtagctgtttggtgactatcaaatcaccttattttagttgtttccatgatatttatttctaactcatagttttgcatttatttatttccaaattgttcatctcctcacactagaaagtaagttccgtggaagctaggacctttccttttctgttcatttctgtatccctagaactgaggtcactgccagatcaggcacatagtagtaggcatcagtaacattttgataaattcattttatttgactttgattctgtagtcctatgttgccactatttggagatcaattggaattttacttctgtctccctgagtattggcaatcctactgatttcagtttccctgtggagctattaaggaattcacagttcctttgtcttggccattaatgagctactgacctgaggaggagaaggtacatcccttggggataccattcaatatagaattcaatatacaatatatcacctcaggatatttgaaaacttctagtcatcaaaataataataataataataataagtttcacaaatggcagcctatccagacccaaatattttataactaagagattaagttttctaatgttattttttttggagtttctttagggagttttattcttcataactgcctcagtgtgagaataaagtgttagaaatcgctggtctcagatcgccctagctctagagtcctgcccacttgcttgtgcttacttatgtcatctttgggcttcagttattgtctatgctaccttttctacctggacgttgttgtttatcatccttcctttaggtatctgccgatccgctctttcctctagcaggcattttgctccttccgtgtgaactcatttcatgtagcaggaccttgatcatctacaatttctctccccatctggacttagctttgccttggaggtcgtatctcaatactggaaggctgcgatggtctctccgtgtcggctctctgtgtgtcttctcttcattgtataaactaaagatggctgtcctgtgctctgctcattatggcagtgatgtgaagacgactccttccctgcaatgctcatggcactcactgcaatttgctctgctaatgctgaccttttttattcatttatttgttttgagatggagtttcactcttgttgcccaggctggagtgcaatggcacaatctcggctcgctgcaacctctgcctcccagattcaagcgattctcctgcctcagcctcccaagtagctgggattacaggcatgcgccatcatgcttggctaattttttttttttttttttttgtatttagtagagacagggcttcaccgtgttagtcaggctggtctcaaactcctgacttcggtgatctacctgcctcagcctcctaaagtgctgggattacaggccactgcacctggctcatgctaaccttttattgataaggaaatcctgagaatgagacagagagaggccttaaattcactttggctttcatctgccaagacaaaaaccaatttacccaaagtcgccaaaacaaaccaaacaaaaaacccaactaatactttcttaccttccggacttattggccagagttgacttgttagtagccacgacacactctgaaacaactatgattattttaggaactgacggactacatggtaagaaaagtaaagttcatttccaattatacatgttttcacttttgaaatgagaaacctgtttctttgacaagcaatttagatatgcccaactttcttggggctagtttaaatgattatttagccttcaatatatttttttaaaaggctgaaataatcaagtccttaaaattcaagacagatgatgataatttagaaactcatgaagatgtttatggcagactgtctgcatttcattcgtgaacatggatcaaggtataccataaatgcaaaaattgtctgagagactggttactttagctgggttaagagattgactttattattgtttttaatctgtacattaggacagagaggataaaatagaataaaatagagagagacagagagatagaaagacaaagaagtaagtgagtagagagtgaaccatgtaggctggctgctaatggggtggtaattcacacccaacttatgagtgccagtataagtcatgcttgagaaatgattggatggatttaaagagggcccgtcattattccttattatttcattcatgtattcatttaacatgtatatagtatcaactatatgccaggttttctgttaaatactaagaatagaagaattaacggtatggtgtttgacctaaaaaaaatactcccaggttaggctgggcatggtggctcacacctgtaatcccagcactttgggagtccgagtgggaggattgcttgcagccaggaggttgagaccagcctgggcaataaagcaacaccccacctctacaaaaataattaaaaaaaaaaaaattagccaggtccagtggtacacacctgtagttctagctatttgggaggctgaggcgggataatcacttgagctgaagagttcaaggctgcaatgagctatgatcacgccgatgcactccagcctgagcaacagagtgagacccttgtctctttaaaaaaacaaaaaacatggccaggcacggtggctcatgcctataatcccagcattttgggaggcctaggtgggtgggttacgaggccagaagatcgagaccatcctgtctaacacagtgaaaccctttctctacaaagaatacaaaaaaatagccatgcttggtgacacgtgcctgtagtcccagctactcaggaggctgaggcaggagaatcacttgaacctgggaggcggaggttgcagtgagccgagatcgtgtcactgcactccagcctggcaacggagtgagactccgtctcaaacaaacaaacaaacaaaaacccttcacagtgtggtgggagaatcagacatcttatttaccattatatatattatatatataaatattatgtgcatatattaggatttatgtgtgtgtgtgtgtatacacacacacatactgtgcggagcattgtaagagagatatatttgtgttatatttgttattaaggggtttttcaatgataagacatacatgatctctgaactcgcagagtttataatcttgagttgagatattcaagatcagttaaggagtcagtagtcagcactatgataggagaaggcctgggtattataggaacatacagaagggaattttaatcctaaattatggaaatagagtagaattaagaatcagccagaacaaaaatgaacctatgatagaggatcctatgatagaggatgaagaaactaaggctgtcttgggaaagaagggatgctgagaaaagcttctcagaggagatggtccttgggctatgccccctggttaaatcaaggggcagaaaggtccttgataatatcaagaaaggaaaggaaacaagcactcagaattggtcaagtctcttccactagttacatctctttaaagcattgcaggttctgtttccacaaggggccagaccttcctcttacctttggatgaaagatgaggcagtgttgctcagaacatctcagactctcagtggtcatccctaaaagccccttaaagtggcactggggagggaaaatggtcctaacatctgttttgaacaaatagaaaattgctgtttgtaaggtttgatctgaaagacaaaccccctccctttccattgggtccaccagccttactcagtttgtgtcagaacctccaagggctgaatggattgtgctgtaaattgaacctcaggttccattctgagtacttgaaacgtgacattccatccactaagccctcctgcttgggctgtttgtcgattctaatgtgttgaaatatatctgcaactctaggtgctgtctccgcccaagtccagaaatgcagttttgatcaaatctcataataatatggggagatgttgaagattaaaacctattgataatccacactgccagaaagcaagatacagaggaaaatttaataacctgaaaaacggttacagaagagtgtggctttattttcagctgtcttttttgtgtacttgtttccaacacagggtgagttttgatgagggccactcttgggacaagtatggtttcacttcggttcctctctttgttgacggggctctggtggaggcaggaatggagacccacatcatgacgtgagtacttcttttgctgtgacaggaagaagaccagagacactggttctactttcattgaggccttggatttttcccagggaaccctacaccaaagtggtccaatctctgggccaaaatttcctcatctataaaatggaaatacttatttttatacctacaaactcaaaaagctactgccaggattagggaggctagggtcctaattgaacagtcaaggtttctaatagaatttaaagaattatagcaaattcccatttatttaaaacccaagcaaacagaaaacttatgtcgttagatggtttttttctctttccaaaacagtctagtgggagataaggagcaggggcagggatggagggagtaaaacagtcaacttattgaaatcagaaatattgtaagagatgtctctttctctctctcatagacacacacacacacaaacacacacagacacacactccacagttattttgcttcagattatttcactgtaaatttttttctatactcttttataatgagatttaatcttagaagttgatcacctgtgtttatgtgtgcacatgtgtacatggtgagtgggtaaccgtaatcctccaccaaccaatactgtcccccacctcccctactcccatttggctggagaaccttacacctcagctcttcactggacagagtggagtcttgttgggcaaaattaagggatatttgctacagtgtggagttggcacagaagggctcacagcgtgcatctgtgctggttcggtggaagggtgtatgatcttcctacgcttagggacactgctcttgttttaacttttgtacacatagatttctttatagtttgaattagtctttttccaatggtgatggacttggaagaaaggccaatctaggagccaataagtgatcagttataaaaaaattctttgtaactgtatttatgcagttttgatcaaatcttatagtttggccccattctcgtctatgaggcctatttgaactcattgcatcttcttttgggcattactttgaacaacatcatgtgtatgccaatctctacatgacctggtattccctagcaagtttaaggccacagcttaagttctgtgttcatctaatcttaaatggtaataatttttttctcagcttcagatggagtttagctggtcacatggatatgagggagattgacctcagagccaaaccatttactgaaaagatgagatagcactcctgttttcctttcctcctggccaagactccctaagagcttgacagagcttctgtgcctgttttattttcttatcaagatacttagagaatagagcataatcattttcttataggggatctttttatgaaattaagatggatcttggaagtattcatcaaaatgaatataaacaattcaagttacctgttttcacattttgttaaattcagagtttcttttgtatgaaaacaacacagattttgtcaggactcttcagatagctggacaagccctggaagggttgccaagaggtgatttctatctctattctaaatttgaaaatggtattgaaaccaactggcctactagggttgcccagttgtggaatggcaatggcaaagattgaaataggagttttaaaatattatgtatttctgtaggaactgtgaagacagggagtccatttggggacaagaatgcttagctttgccgttgaattgaaaacttattaataaagtaggtcattcaaatactgtgtatccttccccttactgttaaccctgattctctctttagctctgtgtggtcagggagaaaaaacagccactctaaggttctgttgctttctcttatccattgatttggagaatttatatatttaacagttagagagcttctaatatatatcagaccttgttagaacttaggagattttataaaggcaaatgaaattatttgtctgcaaggagctctcagacttaagtggtgagagtaagtggggataaagtaatcatcatggtaccctagttatacagccaggagatagcagaggaaaacgaagaattcacacacacagtaggtgacaactgagttggtctggaagttttcatagcagttcacaagtggaaaaccatataatagagaatgaaatgtaagttccaagaaagcatagatttttaacagttttattcactaatataaactcagtgctgaaagcaaggattggcatgttgtaggaagtcagtaatcgttgaatgaatgaatgattccaaggcaaaggaaagaacacaaacaaaggtaagaaccatgaaagagggtggctgggtgttaagggagtaagactatgaaagattttaggtcacatttaggaatttgacctgtatccagagtgatatttttgaaattaaaaaatctgatcaaatcaccagttttcttaaaacccatggagccctttccattgcctttaggatagagtctaaactcatagaatggcctacaagtatctatattgaccacctgcttggggctttttctccaacctccctgacctgaccacccttttctgatgcactggtgccttcctgcccccaggttctttgtatctgccagaatgggcctgccttccctacttaaacaactaaatttctaagtatctttctgatctcagtttaaatatcagttctcatagcctgccagatcaggatgggttcccacgctctatgttatctggccttatttattttttccttcacagcactttagataataaatgttaatacaaagggtattagttgttgaatatctttcccctccatcttcatctacccttaagacagacatgtggatgcacacacatgtgcacacgtgcacagacatccctgcatgtgactttaagttcccatgagggaggatctttgtgtatcttgttctttcagtgccatatatttaccaggcttgtgctaacatggaggatttaacagtatatatgtactggataaatgaattattaaatggaagaatcaagtgacttctaaaaatcttacctttgttgtgattgttgtgatttttctggcccatggctctagcatgttaggaaattgattatagatctctagagattctgaaatgctatggtcagaatgcagtaggtgcaaatcatgggggctggggttggataggaatcagagcagactgcatatgtgtgtagaggtgtctatatggaggttatgatacattggggtggaatggcatgtgggcacaaaagggcagctagagaatgaggagcttactgggaatgattctgatttcctccacctttcacaataatctgcccaatttccacttttcctggaggccagtgctccaggaacatggacatttctaacaccgtagctttgcaggaggatttacatgggagacagtccccagagtggaggcctgggacttggctacctttattgctctttttactactgtcttttcagatgttattatttaaacatccccctggtaactgtaatgggaaccatctagtctagccaaattcaaaatgaaatgtgactgttcttattacttaaggctgaggacaggctgactgacaagctggagggcctattgcagtctcaggcagtggctctccagatgatgagatgcctgtggctgttgcagcacttgggcctctttggtccactatttcatgaaaggctgtttgccctttgattagcactttaaagagagcttttctttagcttgactgagatgtggaatcagatagaaaaacactgctttcctgcatcctcaaagctatgtttgaaattctttcctgataagaaatgtttgaaccaattggctatgatttagctatagttttacaggggccaaagagaacctagcagcttcctagaaaaaaaaaatcttagaagggagaagtacagcttctctgaaagagatcagacacttcttaccatgagtgaatgtctaaaatgcttaaggagaatttagtctgatttggaggaacccagtgaagaccttgcagccaacttgtgactattcagcatctttttttttttttttttttttttgtgccaggtatcacattgagcactttttcaaacttgattttatggaaatctcccaacaactctggaaggtagataggattggcatcattgggcagatgaggacactgaggctcagctcacatgttcataaagaggcaaaataagagcaaggaatgtgaatttcaagctccaggcttgaaggtaaaatttaaaggaaggtactataattctctaaggtttgttccatcaaggagtaccaagatgtgtggggaaacagtggcagtataccagttgtttacttagtaagatgagtgcctgctatgctgccagacaccaagtcacagcagacctagttcttgatgttaattcacaatccatttgaagaagtacgataaatacatgaaataattagataatgattaaatggtaaggtatggtataaatgtgttttgttgttgttgttgatgttgtttgtttgtttgaggtagggtctcactctgttgcccaggttggagtgcagtgatgcggtcatggttcactgcagccttgacctcccaggctcaggggtcaagtgatcctcctacctcagcctcccaagtagctgggactacaggtgcttgctaccattcccggctaatttttgtattttttatagaggtggggttttgccatgttgcccaagctgttcttgaattcctgagctcaagtgatctgcccacctcagcctcccaaattgctgcaattacagacacatgtgccagtgcgcctggccagtatgggaaacattttagttgccgttagatatcaaagatgtgattgaagacagagtggctgtaaaggggttcatggctatacagaaaagagggagcaaggacattcctggtgggtggaacagtgtgagcagacatggagtggtaggaatgtgcctggacagtagaggaaagtgagaggtgaaaagggctacagatacctttggctagggccaattgccttgttgactcctcttataaatccagttgtaattggcataaatctctgattaattgttccaccagcagaactaacagccaaagtgaagggtagaaagatcattttgcttagaaaattatgcaaaccccaaagctgcagaggtttttttttctttttttaaatgaagccttttccacttaaaaaactgtgaccacatgcctagcagggatcattcttttaaatacagccttagcacaacgcagaggctcagcactgagcttaaatgcattgtttagcctctagtaactgcatccgataaagtcgttgaaaatgaaccagagctgcttccattgatctgtttttcaattctctgttgtttgctggaagagcctgattttactttgcccaaagtaagtcattcgagtaatcggcaaatccggtggaactcccaagtcatcacctctcaggctggctgcttgattcataaccttcagattgtcgccaggcttgccagcaactcagaggcacactcttgtttgtgccaaggaacacaaaagcagaatccatgcctgcagagggggtattggatgatggtagggtatactggggactggcaacagcctggaaggaaaaagcttattttgatcaatggattgctgtgtgggctcagggggagggatggtgtggtgactgagagcatgggctttggagattcactttccagggaaaatgctcagctggctgtttaccacctatgtgactttagtgccttgcttcactccgctctgagctcccgtttcctcatgtggatgtgaggactaagtgaaataataacctctattgaagaacattggacatgttggtaatctctgtgatctaatgatcaagaaacaggccacttgcagggaagagttttggccagctagagcaggggttggcagactcctgtaaagggccacacagtaaagattttaggctttgctggccatagggcttttgttgcaactattcaatccttctagcctagtgggtgaaagcagccatagacagtatggagacaaatgggcatctgtgtgttccaataaaactttatgaacactgaatcttgaatttcatataattttcacatgcatgtcataaaatataattcttcacttgcttttcccccccaaccatttaaaatgtaaaaataactctcagcttgtgggccgtccaaaccatagagctggccagacatggcccgtgggttgtagtttgaccctgaacaagaatgcccatgggtttttatccattgtaaatatattaaaaataccatttgaatttttgacagtttttacatatttcccctagctataaattgcttctccaattgcactgcctaatgaaatattgaaaatatactttttatgaaatggcttagaagtttccttatttctttaaaaaagttttattgagatataattgatatatacaaaattgcacatatttaatgtatacattttgatgagtttggatgtatatgtacaaccatgaccatcaccacaattgcagttactaaacatatcctatcatctccaaaaattaccttttgttcttttgtgagtttttttgggtaagaacatttaacatgaattctgtcctcttgatgtattttaaagtgtacaataatgtattgctaaatacagacactatgttatacatcagatttctagaacttactcatcttgcataattggaactttatgtgcattgaagaactcttcattttcacctcctcctgcccctggcaattatcactctattctctgcttctatgagtttgactattttagataccttatgtaagtaaaatcataaagtatgtgtccttcgatgattggcttttttcacctaacataatgtcctcttggttcaccaatgttgtcataaatggtatattcagcttttgttaaaaaaataaaataaaaaacactcctcatttcttatcaaaaccccacatataagtctcacctctttcaggaagcccaagttctttctcatttccttatattgaattcctttcatggggctcacagtgactcacaggtgtatcttgcttggtgtgtactttttccaatggagcccacatttgcaaaatcagaaacatctggcagcactaagtccaacaccctgtagtccaacattctcctgaagctgcatggcaactgcccacttcggacagggtatgctgtttctgccccacccctcacctggtgtacacatgtcctctccggctgtcccgtttcactccttgttcgttgaagttgccctcctgctctggtaagattttaaatttgtgattcacaatttggattctatatctgcaatttcataactacattattgtcttacaggtttttgttgacatttaagaaatacagaataatgcaaagaataatattacaaagcttgtgtacccaccacctgaaattaataaatattaatctgttatcactttgattcagatttttaaataaaatatacaggaaatcctagatagaattgatattttcattattgtccatctcagacttattatccttactccttccacaaccccttctagaacatatgtggacactttcagcacttatgtattcatagaaatatatgtggtatcactttatatgttttctaaatgtctaatttataaaaataatattcttctacatgattttttctctcaatattatctatctggggtcatatccatctggtccaggcacttttcgtgctatatggcatgttgtcatgatataaatatgcacaatttatttatctattttcttatcaatggaaatttaggttatttctagctatgtgctcttacaaacagtattaccacatctttatgtatgcctccaggtacatacatggaagaagttctctgagttgcaagccagaagtggaattggtgggtcatggtgaattgacattatcacaaataatgcactcttattatgcaacaataatgcaataataattcttgtactattttctgattgttttacatgtggattatctttgcagatagaatgccagggctttttatttgttctgtaagattgaggaggcttgcaactgtgtcttatttattatctcccatagcactgaacataattgtcctcgtgcataggtgatgctcagcaaatatatggtgagtaagtaattctgttggactcgatggcaaactaagagcaggtactgaactttatactttttctgattctttttattttttggttcaggaattgacataaagtaggaaactgagaaatgtcatgacattttaatgacataagaaaacacagtgtccctctttcccttcctctcttatagctctttaaatttccctatcttaaccgggtgcggtggctcacacctgtaatcccagcactttgggaggctgaggtgggcagatcacctgaggtcaggagtttgagaccagcttgaccaacatagtgaaaccccgtctctactaaaaaatacaaaaattagctgggcgtagtggtgggcacttgtaatctcagctacttgggaggctgaggtgggagaatcgcttgaaaccaggaggcagaagttgcagtgagccgagatcgtgccactgcactccagcctgggcaacaagagtgagactccatctcaaaaaaaaaaaaaaaaaaaattccctctttcctcctgtctaaatcccatctcaaatatccatcttctcccttgtttccatctcttagagtctctgtcattgctcaactccagacttatcttctacaggttcacagaccacattttctcacccacagttatggaccttaaactttcaagcccattacagggatttagttagttttgagaaaagaatcaaagttgtttggactaggatgatttatttttattcattttagaaatcatctttcttccttttgcttcttctctcccaatgctttttagtctctttctcggttttccttccacccacctcttccccccatatttattttcaagcctttcaatctttgccgctttccactaccttgccaatcattgtattgtgtaactaacagtctccacttacaggattcttgctgttgatcccctgcctatttctattaaggtctagttcatgtctggccttcgctcagtgcaattcgccctgtagccactgacctcctttaccactaatcccatctacatcctaatgggaaaacaatcaggtggcatggacacacaccaatagccaagaatgtggcctgaatttctggagaccaacagctgttgtctgctgatgtctggccttgccacaactatgctctttctactttgatttgaaatctgtcctcagcagcttccttcatggagggagggaaaggaggagggcttttggaggcagaggaaaaaggaggcatggggagccaggcctttcagagagaactgaactcttataggaacacttaaaagaggattcgggagtccacatgaatcaagtgttgctattacaagaacatttattatttctttactcaacaatacgtatcgatagcttactacaaggcaggcactgttttaagagttctagaagctgggctagggcataaacaaaatagtcagggtcactgttaagaagtttatattttaaaagccacttccatcctcagtagaggaaagatcaattttgaaggaggtttatttcagctctgacattcatggaatcagttctataatccaattctgagctttttaaatggtggtggtggtgctgctgctgctggtggtggtggtgtgtgtaactgagtaaaagagagaaaaaaaattgggggagatagatagtgctaaggcttaagggcttcagggtacctctaacttccaaagattctaaccctggcttcagtttgatttttgctttttgcctagcctgagaaagaataacatgccaatgaatcaaaggaacatcacagaatattaaaagcattacctccagtgaggcttttattttcttatctacagatttttttagttttcaaatttttcatgatgagagtgcattatttttataatgagaaaaagggaaatcatttatcaaaatgataaatttaaaatgacattttaaaaaatcatctcccagataatgaaagggaggggctgcatttgagtttatcctgatgatgatgtgggtcactcttactctccctttgaggttgtgatctggaggaagaaagagcctcaactgtgtaccatcacttcccagtgctaaccaatgccctgatgaaattaatactaaatcatttcaaataaacatactactagaacccaataagaggtaagaatgggaaatagacaaattctacttgtaaaataaaatttcaggaaattgctaaatagtggcttctgctgaaacagttctctaatttcttcaaggtcatctggttaatttatgctgcatttgtaagttattgtgtattttaaaaattaatgaaagatttaattatagcagggttgcctgtgaccttttgtgaaatgacttcatcataaatctgcaggcattttagaactgttttccaggtttgtaataatttgctctcaaattaatgacatccagccagtaaaaggagttgaagctgggtgaaaggattgagtcgggatttgtggttacctagcaatggctaattctgagtcctggatggaggtggtagaggagatggtgtatgactcaccggaatccacagcacgtttaactatttgcttagaggaatgagaaataaatccagtgtgtcaatagggagaagttgtatgtagccagagtgggtcactggagagcagttgattacagttcatttatctacatatgaatgtagggtaacccctggaccaatgtgagaatttctcttcttccctcacttctagcaggggttctttatttgtaaattgagggtctttgcctgccctcagcttgctggctacccatgaaacccattttagactctagcgccctagtatttctgactttcacccacgcaagtggctcaatgagcagcatagttaagctgtctctggataggagtaggctcatttcatctttgtccctgtcattctgatgattcatttgatccaataaagtgagaggaaaggctgtgcaggggaatgccacgtcttagcacatcaaagatcctctgtcttagaagaaactggtagtgcacatctgtagttacagaatggcaggctggagtttggaaaatgcagagcaccctttaggcgcaggagcctgggagaaaaggcagtgaaatctggaaagtaagtcttggctgaagcctttcctagttaactgcagtcctggatgtgaatcacttctctactctgcattcctcaagttttcatggtgctgcggtcacatatggcacaccatgactctgcaagctgaaagtttcccatgaagagcagtcagcttggaagaaagagctggctgtcaagagacttgggttccagatctttgtgtccttgagcaggccttagtttccccagctagcatgtgaaaaggttggtcagaagctcatccataaagacccctccagcactgaaactttataattctgtttgttcttttgtatgcctcagggattcccaactggaggctaagccaatagactcatagctcagagtcaactacataattcttcatgcagtagatgctttagcctttgagacaaatagggtcataattggaactttctagataacctcttctctgcagatttctccttttttcctccaactgtactttcagttttatatatttcaaggcatttctgccttttatgcaaacaggctattaggagctggaggtgagagcatcccattgcccatacctcagtgccaaactgtgcagttaaatgattgctaatgagtcatgaaggacttaaaaaagagtaacagccttgctgaaaacacacattgctgagaattgttttagaatggttgctgcaaatgcctaaatttgacccctggcttcatcatttacttgctgtgtaaccttgtcagatgagttatttaacttttctgaacctcagtttcctcatctgttaaatgggagtaacgaataaaatgagatgatccatgcatagttgttagcataccctcagtgttcaataatttttcactaatattagtaatattaattgttattattatttttgagacggagtctcgctctgtcacctcggctggagtgcagatctcagctcactgcaacctctgcctcccgggtttaagcagttctcctgctttagcctcctgagtggctgggattacaggtgcgtgccaccacgccaagctaatttttgtatttttggtagagacgggacggggtttcaccatattggtcaggatagtcttgaactcctgacctcatgatctgcccacctcggcctcccaaagtgctgggatttcaggcgtgagccactgtgcctggcctagtaatattaattattattgttatttgactgagatctgctgatctactgtttgcaaagtcttatgggtatggatcatggggatataaaagcataaggcacactgtctgcccacaaagttcttagacatccagcaaagacaaagtaaataatcataatatataaccatactaataattgtttaaaattattaatttgttaatttatagcaatcactataaaatacaactcaaaatcgtgttagatactgctattatcctcattttgcacatgaggaaagtaagtttaaagtgtgtaaggaaccctctgtagttccaggattggggctctcatctgggccatctaatatgaacacttttgtgcttaagcactttattctacagccactcagacaataaatatgtgacaagcacctgtgatgcataaggcacaacttatgtgagttgcaaagttctaagaagttaaaatctagcaaagagaataagacacttatgtacatatgctatgatttttgatacattttggaagtgctgtgggtcatacccaaaatacagataaaatgctaagaaattcagaggagagtgattttattttcttctgaggaaggaaaagaagcaaggaggaaagatcagagaggacataatagaaaggtagtatttgaattacaagtaaaaggaataacctaccaagaaaatagaataatctcaaaacctgtacagttttgtggttatataatataaagactataaaacatgcaaggagaaatgaaaggtttgcaatcgtaggaaaacattttgataaacctcacttagaaaccaatagaccaagtagtccaaaggttagtatgattttgaatattgaataacattattagaaagcttgatttaaagcagcagtccccaaccttttgggaaccagggactggtttcgtggaagacagttttccatgggtgagagtgcaggtggggggtgttgatttcgggaagaaactgttccacctcagatcatcaggcattagttagattctcataaggaatgcacaacctagatcctttgcatgtacagttcatagtagggttcatgctcctgtgagaatccaataccacagctgacctgacaggagacagagttcaggcagtaatgctcgctccctagccactcacctcctgctgtgcggccctgttcctaaacatttaatatatttcaacatgttgaccatacactgagccaaatacaatgtctagactactttcaaagagctgattatcattgaaaccacattctctttaaatatttgcaattaaattagagattttaaataaaatgatggtgatgaaaacaaagaataaaaaacttcagttttttatattctatatgacttccatgcccatactcacattaataaatttgtatgcctttgaaaagaaaaaggaagaaacctcatacatttggaaacaaaaccgtgagttctttatgaatcattttgtttcttaaagaggaaataaggatggtctctggaaaatatttagatttgaaaagcttttctcctgccccttttatcctccaatcaaaacctactacctgtattttgacctaaggcttacagaatgagtaggagttggacaagacaaggtgtggggtaagccatcccaagcagaggaaaagcatgttgaagcctgcgtctcttgatgcagaggcttctagcctgaagactgacagtccagtcaaggcagtaacagaaagaagaaactcaggaaggggctggcagagtcggcttcaccctgctctgtttctgaagatgttattccggcagatggaaatgggacagttggtggttagaagaactcgagttgcaggcactggagtctctgaggacagaaaagaaggacgtcccagttgtgagtcaatggcaaatcaaactcaacaatattatcttagttgagtttgatcaaagatgcactcaatagtcagcctgcagtgaagtccactaatataactcccaaagcactgtttgttcttccttttcgacgttttttagtggcttcctaggaacaaattctgattctttcttgaaggattgtggtcaaccattctcttcttgaaacttctctcagctttcataactatgcataaaagttggcataattgggaggctacaaaagaatcaaatgactaggcaggcgagagtcaagtaacccagggctgctctcctataaagaggaaaacatctttacagagcctagtcctctaattacatttagtgtggcattctttccacctaaattatagcaattatatacagagatcccctttgaaatcatttaattaatgagtagctaaccctctctgtgtatagaattctaatgaggtcttttatttttgtgaaccgcctccctccctcaaattaattactccccttcctgaaaggcttactcaggcctgaatggtggattaaaggaggtgggttatttagggtcccagcaaatcatatttgtttgtggaaatcctagcacagtccagggtgacaagggacagagcatttgctgcaattacttgcctgagattgtttctgtccttctatattccaaatgatacacaactcagccacattctttgacccagaaataagggcagatgaagctattacctcaattttggaagaagtgaatgattttgttagattaattctatcattaatcaacccagaagtatttattaagcatctgttatatgaaagaagtaccagtgcagacaaagatgaatgactgtaatagataaatcctttgtgtatagggttaccaggagatggatagctttgatgtagacattgaggtgtactttgaggtagacatggggattgaaagaaaataaactcttagaaatggtctcaaaagggccacattccctgtaggctatttctgcaactcattctttgaacacatgtcactgatttcaaacaatcttttattaaaaagataagtccttgagagatgaagtgatttgctcaaggtcacctacttaattttatggcagaccatgtctaggaaaagccaagtcttctatttccctgcccagtactcttgcgaccatgcccagaccacccatatgttaacaacaattcaagagcacaggaagaccacctgtaaccagagtcatgttagcagtgtaggcatttagaatcagaggagttttagaaaaagacagagatggcctcttaagtttgtagagtccaagaagaaggtgaatcttgagtggttgtcaaatactctcatgaaaaatccaagtggcaaggtaaaaggaaagagaaaaatgggagttataaattttaattgattttttttcctgaaaatctatatagtgagaaatagcatagagaattcatttattttgttcctgtggttgggagcaacttcctcaggaaaccaaagggtaggctacctgtttccaggtggtcatctatatttatatatgaggtgttcactttctccaaggctcactaggaagatatcaaataaaaaaagaaagtcccagcatatgaagttagtacgtaccttgataaaaggattttgagccaagcctattgaaagtccttgatgagaaagtccttgggtgagtctatgaggattccaacagtaaaaatgatgatgatggtaataaacatttgttgtctattgtgattttcaaaattttcacccacattatctcacatgttgggggtttgattatgttggtgaaaatatgatttgagttcaaaagggggctagcaatgggtttctgaaaaaggctgtcaaaatagtttatcttggtaattgcaaggaagtgggatttaataacagtgagtttggccatactaagaattcgtttctctttgccaaagacctgagaataaaatttcacgctctagaattgccttgttttttttctgttggcattcaatgatcaattagccattctttttcaagcaactattgttgataggttccgtaggatacagagaagtactaaaagtatccccaggcttaagaagctttttaattagttgacaaaaatttcaccaaagatacaggaaatttctgaaattctagattgatggtctgggtaagttgttctcaaaatacggtcctggggccagcaacatcagcatcacctggaacttataagaaattcaaatacttaggtacctcaaatgtactaataagaaactctgggagtgagacattctatgtttaacaaccctgtaggtgattctgatgtagacattggagaacctctggtctagagataacaggaccatttgagcttctgaagaaagagctcagtgttgccagaggaatcacagaggactttttgaaataagtattgcccgatttgagaattatagtatccttttaatgatgctccatgcctttggttcttccatcctagctatctcttgggctttaatattctattgatacatgaaccactttgttccccctgtaaaagtactacacatatgagaagtgtgctgtacctattttgctggtaacaggctctccttaacttaagaggagtatttctggcagatgagaaacttttactggaacttgattattttcaaaattattattatcaattagaagcggtctgggctttctcttttcctaattcagaatcaagaggaccttctcagtgttcatcactccaaagtgatggacatggtttatgatgatgcccacttcaatttctctgttggtgtcttacttccacagatcttgttgtaaattttaacatctgctccttgggtattcatgaaaagagaagaaaaatatttgaatttgaattagttcttaatttcattccctgcttattttgctatgtttctgtcatttcttcagcttccataagctttaatcagaagagcaatgaattaatgtgatattgaacagaattagggaagctgggtctatacaaaagtgaccatgtgtctgagtcatgtatgccccataggaaagggaccacagtgaactttgctcttccctaagctgacaatgggtggatcgatgtggaatacattaacgtctgaaagttgctaggggattttaccccactgatcttatttggggcccattgagaaaatgagcaaagctcataatcctaccagtgtttaagtgattaaaattttgcatctgatacacgaaagtgacctcccgggagaggaaactagcacactcctgagtgaacatattagtgtatcagtttacagtatggggaaagacctgggaaacacaatataagaaaatctgggaaagaagccaaagaaatgcacatgaaaggaatgtacctgtgaggattgcaaaacagaacaatcgaacaagtctgtaagtcctgactgagcacctattcttgtgttctgtcctgaaatgagcactctgagatcagtaatggatatctcaaagagttggaaagaccaacaacatggacattctttgaggctcggagtcaattaggctgtacacatggatgatgcttgcatgctgctccatagatcaagcctgagcttgaatttctatgcttactaacttttgagcatctcttgttcctgttgttagaacctttgtctgttagaaagttccctcacaggccaggtgtggtcgctcacgcctgtaatcccagcactttgggaggctgaggcaggcagatcacctgaggtcaggagttcgagactagcctgaccaacatggagaaacactgtctctattaaaaaagtacaaaattagctgagtgtggtgatgcatgcctgtaatcccagctactgggtaggctgaggcaggagaattgctcggaccagggaggtggaggttacagtgagccaagattgcaccattgcactccagcatgggcaacaagagtgaaactctgtttcaaaaaaaacagaaaagaaagttctctcacattttataaacttccacacttttattttttcatgcaagagagctccctagaatatcaacctgctgctcttccctcactgcacttaggaatcctaagtcatgtccaggttaactagcctgagttcttacactgcagtttgggtagatgaaagtggtcttggatcatattgccacctgtattagtttcctgtggctgttgtaacaaatttagtggcttaaaagaacagacatttattctcttgtagttctggagtttagagtccacaatcaaaaggtcagcaggcctctactcccctggggctctaggggagaattcattctttgcttcttccatcttcctgaagttccaggtgttctttggcttgggctgcataactccaattttggcttctgtcttcacatggccttctcctcactgcatgctactcatctttgtgtcttttataatgatacttgtcattggatttagagcccaccctgataatccaagatgatctcaactcaagacccttgatttataagtgcaaagatacttttcccacataaggtcacattcatagctccagggaataggaagtggtcatatcttattgcaggttaccattcaatgcagtgtaccgtcttagtcactctcttcttcagtggtccttaaactttaggaactatgaacccctttgaataatctgataaaatatatgtgatttttatttatagatgagtacttatgtgccattaagcacctttttgtttgtttaaaatttaagcagattcatacttcaccaccactaccaaagcccaaacatgtgctgtagattcaaacactcagtctatatccttcttgaatggtaacagtcaaaagcaaccacaattttcctggtgatctggttaatgtagaaaaaaacaggttattgcctctttggttctagacaatacatataattctgttaatgcatttcaagatcacgttaaatattttatgtctccctgaagtgttcacattgtgtgtggaaactcttaagctgctattattattactattaaacctgaaaagtaccaagccccatttcttttatctggtacttatgtaattaccatggagaggatctagctaacatttctctaggtgacatcacaccttattaaattaagcctgtctctttagtctgtcacgaccttattgagtcttgcttctgccatcgagcatattgagggcttcctccagctttatgtcatcaaaaaattcaatttccaatgatgaccattattttcatgtcttcaagtcgttaataaaaatgatgaacaagaaagagcagacaacagaaccttgcagcggactactcacacctccctcttggttgattttaatgtcttcattaggtactgttcagccacataattttaccaagcacctggctcatattttctcaatctttttgtcaagattcctatgacagaccctgttcaaatgccatgctggtatccaggtaaatcatgtgcttcacattttcctcttctgtctgcctagtaaccttttaatagaaaggaatgtgattaatctgacatgacgttttttgtgatccaggaagtaaatttgaactatgtggagtcaacagaaatatatggtttagcatcattaacatcctgcactagtaagtcttccaatcagggaagacttactgctggaagtggtatctgaatgcgagagttttgaaggctggatagagaaaaaaaagatatccatcaaggtctcctcccactgtttttgtttgtttgtttcgttttcccttgatgaggcttatcagtttaactgtcctctcttcaaacaagcaaaaatgtttgataagagagagctgttttgttaaagatttaaaatggactgaccgctatgtaaaatgaatttagagctaagaaatggaaataccttagtggatgacctggcattgatgaattggatttggaaaccactggatttaccaagactacaagagaacagagagaacccagggagagggagttaggtttgctttgctccacagtgtcagctgcatatgttgggtattctaggctcagagtttctcctaccccatgctgagcttagatccacacaaaacccatgtagttttactaaaggagagatcctgtctctctttcaaagtctgcttaattttcttttagataagcctcttaaaggttttatttaacttttatctgaagcacattcaaaattgatcctgagatgtattgtaaattggatgatccacaaaagcaactctatattcttcctcatttcacaagttttgtcagtctctacctttcccataagcatcctcatcttttagagagcataagaaaatgacccaggaagagagttaatcttgtaggtgtcaccataacagtatctgaacttgggcagaggagaatccagggctggtagtgtgattaagtcttgctgaaatggaagccatccaattccttgaaagacctcagttgttttaagttcgcagcatgatcggtctcccctttacatcactatgatagatgtcttgcattgtaattgcaagacacgccacccgagtagagtatggatgatcagtcttttttttttttccatttttctagaaacaattgatcattcatatttatagggcaatcaactgctgggctttgaaaaggtcagtattgattatctaagtcacagatggtgtgcttctttactatacataaatatgagttccttttatgagtctgctgtgattcttttttctttttaaggaaggaggagggagggtaggtaggtattcatgtgcgttaaacaatggaatttcaactaacacttaaattcaactaggactttgcagttggcaaagttgtactttaaattagcaaattcattccttctaccccaacacatatacttacaatccactttacagatgaggaaactgagtccctgtccatggacatgggtaggcaaaatgccagtgcttgcattaaggagaaatgggaaggctgtgtatctaaatctgaacaggggttttatatgggtgttgagtttgggactaccggtcccaattttttttctttactgggctttttatattttaaatgcttcctgtaataggcatatattacttttgcaatttaaaaaatggttgatttaaaacccactgtgaatgacatgccagttgattgaattgtatggatagtggactttctccttaatggccctcaaggaactcactttggaagaataactaaagtccaggctgcagtgaatctctatctccttcctagtttctgtgcattagtgactgactatgggactttctccccttgtgtctcccactcctcccctaaacacttagagtttttggccacttcagcctccgctccgaatggcaattggtgaaagtggactacaaatctatcttcagccggcattgcaccaaggaggactatcagacctggcacctgctcaatcaggtacacaccccagggagttggagtgctggctttgaggaggaggagctagtgcaagtccgactgggtcttatctgagccttcctatttaggggaggaaggtagtgggtcatctgaggatgtgggtgtggatttggagaaaagggtgaaacacactcaggtccagtagggccagatgatatttaggaactatctcgcaccctgggatcctatctactaattgaggtcactgagctgcctgggggaaaggtgttgatgataacctggggttttagctctatccatggagaaatgagctttttacagctagaaggcctccaagagttgctcattttatctgccaatgtggagggcgagagcatttctcagactagcctgaaataagggacccagagcactgggaacaggtccactgagaaatggtgtcagggtgggtaggtctagcaatggtagatatttactgctgtgagaaataggcagacttctgctccagaaccactgggtccttgtaatttgtatcaacttctcctttctttgttcttgactgggaattaagatttgggcatggtcgtttatcatagagaaggaacattttgggtcaacttcaatttccctctgaagaccatgtgaaaaatgtgccataaatgggctcctttccactagaattgctactgaagccatttgggcaaatgtacctggtggtctgcaaagatgcctggagtccttacattctctatggaggtggagcagaaacgggatgatgtagacatcactggcttgggtgggtggagggtagaagtgggcccaccttccataatgttccttttatgtggtagtgaaagattagcacttttattcttgaaactcctggatcattactgagaatgagactgctacataaagtacctaaatgagaatgaacaggctaatgcttcttgttgacaactggtttatttcaccacctttttgtttttctgtctctcacactatggaatttctctctaagggagagccttgtgtcatgggagaaaggaaaatattcaagaaacgtaagccaggagctcagtgtgccctgggccgagaccactcaggatcagtggtctcagaaccctgtgtctgtgccaattgggacttcgagtggtgagttgtttggcatttcattaccaattccaaccaggtcttcacctgtctgtggggtggggtggggtgaagatgaagttaggagaggaagcatgacgcagagataggaggtgtatctgctggcctgtgggcccatccatcccagttactgggccagatgggaagtctgcattcctggaaggaggacaggctgaggcattttcacagagagagtcactgatctatcagagcagcatctctcagggggcttcttctcatctacactgagcagctgtattggaaactactggagaagttgtgctgggcattgacagaggttagagagctactgccttgctgttgcctccagccacatgcactctcactgtgctcttctacgtgacctctctcttgtttcctttttctccccctaataacagcaatggagaacaaccttaaatctcacttaatgaaattcaaatctcacctatagacaattactcccaaatttccaaatatttacctctggccctggcctcccccttctcttggttggacacatatgtgtctggctgtctactcagcattcatctcctcttgattcactatcagggttatcaaacttaaggcagccaaagcaaagcttttcttgaatccccttcattggaaggagtcccttgcccagtttttctaatttcaataaaacacacagctatccactcagttgccagaagggtttggtttctccttttctttcactgtcagatccaggccatctgcaagtccttgcagtttctaccctcaaaacacattctaagtcaaatcacttctttccatctctcagctgtttgtatcactccaggaatcgaactctctccacatccacccttgtcacttaaaattcattctcctcacagcaaccgagatggtattttaaaaactcaaaccatatcttatcactactacacttagaatactccaatatcttccccctcacttaaaatctaatcttctttccttagtttcctccattgtaggtgatttagccctgcaattacctttatgtcaaaattccttactgttcttacctcattcactgtattgcaaccgcattaccacctcctgcacctttattaatcctggctcattcctagcagagggagcagaaaatgcaagaatttcttccaaatcttagtatggccggcacctttgagtcactcatgtctcagcaaaaatatcagcttctcagaaatgccttctgagaccacctaatctcacctataccctggcacagtctagtatatccctgttttattatctccttagtattaattgccgtacaaaatgaacatgtttttgattgttccactatcacctatctctccagtagaatgtaagtgctgggaatgcaggagttttagactttccttgtttctgcatccacagcgcctggcccgctgtaaacattcaataaagagttgtagcatgtttctgaacattgttccttttaggagggtcaaaaatctccccaattctgggaatgggtacatagcactccgatcccagctggatgaattcttcccctgcatcacaataaaaagctaaagttcaatttgattattttggtagcccatctcagctttgtctttgttaaaagacaaaactaagggcttgggcattggcctctaaacttgggaggggcagggcaatgatggagctgcatttgggcttctctggcatcagatagtcaaagtaagtccaagtgggcacagagcagctgcccctgaatggcagcctcacttcttccagcctcatttcatccagctggttttttagcttgatttgtactagaaactatcctttgtttcccactttctgctaggaatataactggaagccagaggagtgactctgctctccacctgttctttatccttaaactcatacctaggaaagcatggcttcagtgaaattcatgaaaatgagatatactaagtgtaatttaagtttgactagcagagtcctttctgtgaccattttgagcccttggcagcaaagtatattttcacattgtgaaaaatattttcaattattaatcacaattaagcaaaaatagtcacagcaatgagtgcagtaggccactcaaaattatggcttgtgacatattgatgtcaacctgaatattcagaatattaattttaggcttccttgtgtccttctgcagactaactccattgaggcacactgtctttgaatttgtcatgatacatattctcctgtgtctctgtgtgccataatagaccctcacccattgttgggtagcatcacaagtgagaagaaataagaactgtaaaatattttctcatcagtaattccattaacatttactggtctgggcaaaaattctagcactgatagtcacagtttttgaccttggcaagttttcttaatctttgtgacttcatctctatagctgcaaaataaaaatacatgacatctaccgcattgggtcctaaggaagaataaatgaattcatatattaatatacatcattaatatagataaggcatttatcctactgatgtataacatagaaatacaacataggctagctattgctgctgctgttgatgctgttgttattcttacaccctagggttaagtggtccctatggtatttttggaagtaaaccaaagcttatacatccaaataagcactgttttcagagtaggatcttggggtctgatccatttacttcagtactggtggcattgctcaaagtatttctgaacccttctttagggagtgctgtcagaatccatctataagtaaagcacggtgggagaggcgagggggagcctttacacggccttctgtggttctcatacttgcactggtagaggtaccatgtggatccaagacgctgtaatgtcaggatctttattattgccttttaatgagaagaaacatcttggatataggttacttgatcaaggttacatccctgggagagaatgagctggggttcaagtgcagatttagttaaattccacattctctcctctacaccctgccatttctcaagaaatcaaacaagtctttattattttagattcattttgcttcagaaaaaaataaagtttccaagtttacttactctaaaattaaaactcatccccaaggacttgggtttactgctgttgatgaaatataaggtagaatgtttcctcaacactaaaacaatttccaatgaagtagttttgaccattggtactagaatcataataggtgtatggtctccaaaaatattttatagaattttttttgatatataatgtggtgtatgtttgcatttttatagccaatcacacctcatattaaaaagaatatagagaaccacttgagtaaagtagagaagtagacaaggccagatgctcagtttgtggtcataatctcagaacacaaacaaaaaaaaaactcacacgacctataaagtttttttttactactactgagtaggggagaagttgtttttgattactgaaatttctgaattatttacagtgatttttggggggacaatgagactgaatatttgaaattgtcttcttgtttttaagttaacttcaataagcatagtgatttgttaaaagatacagtttttccaacaaatacagtttgtctgtttgctggtctttaatgctaatgctagaaatcagcatatggcgtatagccttgtccccttctcaatggtcctctctagcaggaagtattattagctaaggcatctgaaatacccagtacagttagtaccagtgattatcatgcacagtccatttagatgtttccctaggccaaatcagggcaagttcatttgattgatctaggaaaagttcaagcctcagagacagcagagagagggtatcacctagttcagtcagtttgggagggaagagtaaagactgggaaggatgaattaaagtcttcactttggtggaagaattgaggaatgcaacctggattcacagagggaagatattttctgtctctgtccctcttttgcaagaaaagaggaggttttctagattctcagaacatttatttgtagcaaaacattcacttccacaactttctccagagcgagtatcagtaataagtatgaattctgcataaagattgatgtttcagcataagagcctcataaatccaccagcctcaagcgaaccctagagagccactttgcagcaacctccatcatggcgctggagaaggaccaggaacaaatccttattgagagtaaaggttgttagagaccagcaggcagtcagaaaaggtgcaagagggggctcctctaaagtcacacgagggctcttgagagggagtagccctccaggagacctgaattcacttgttcagtgagaaacgaggttgaaccagagattattatgcccaggagttcttttctttcactcattcatctaacttctcactcgacaaaaactttactgagcccctactatgtaagcagatgttttaccacatctgtgagatgaattatcttaatcttctcaatggactcccagaaggagagtctgctattacagacattttacagataaaggaatggaacacagagatgttaagtaattcactcaggataatattattctgacttcagagtcctgagtcttagtatgtattactggctacctccatgtcccatatggcactacatccacaaagcaagtttattgagtggtgatgtagaagacaggggaggagatttgggggtgtcacagcacatacattcagatgtatccgaagtacattaatctagtggttccccagagtaagcttgagtactctgcctatggagcacaagcaaggatgtgtttccgcagtggacaagtcagaggataaacaagacaataaacaacattgttatttacaaaatatacaaactttataaaatatacaaaagagttattgcactaaaagaaggcatagcagaaaataatgagtataattaaatgctgaattttatggtccaaagctatcatagttacatgtggttatttgagttaaaatgaaataaaaaatgttattccttcattgcactagttaggggctaccatattagcttaatataaaatatttctcttatcatagaaagttctattgaacagcactggttctgactgtatgtgctatagatacacaaaagaaagagaacaaaaagatcactgaactgaagtaatcatggaaggcttcctgcaggaggtagtggtgggactatgtagacttcctgctgaggaagaaaaggaaaataggcagtacttcaaagaaataaataacagactaagaaaacataaacctaaagaaaacattagattaggagaaatatttgaggaatgattgttggattttccaagcattttctgaaatagttgggatataattgtaatttttctttgagactgtatttgggcttatgtcttagctaaatgatgatgttaatgattaatccattgtttttgttgctgttgggcctgcttgtgtttgttgagtgctcactccatgcctaccaagaacctctatttgcctaatcccaaacctaccatgctatcctgcctgctgaagtggaacagggtgcctgtagatcactagtactggaatctcaactggcagatgggaggatggagaaatgggaatcagggaggctgtgatatggctatgagtggtctgagagcccctgcagcttgtctggaagagaccatgacttcttggttagctccaagagtctcagaatgtcattcctggggactagggccctccttaatgagccagtgggtgccctatgggattggactcatgctgaacagggatcaggagtctccattatcacctctgccactgtcagctgtgtacaatctttggcaaagtcatttctcctctttttgcttttcttttccagtctaccaacttaggagactggatccaagaataaaagtatcccttcctattttggcatgcagaggtttattattattattattattattattattatttctaaactgtcctggctatccctcctttagaatctaagccttttccctggatgggatttggaaaacatgcaggttcccggaaatgaaaaagttttagaacttctaaagctgttatagttgagaaagacatagaggtgacttatttcttgaaggaaaatgtgtgtgtgtttgcagaatccgcagcagtagacttccccgaggcaaatcaaactttctggtgcattctgtccaaacctcacaattcaacagaaaaatgcctttccccaggaagctggagaaacagctggagctgcttgtttttctaaatcatgcagacttcggagctgggaaggagattgagctgtatgagatattttaatatacatttaggagaaattaatgaagaagtccacagcttggaggcagccagtttccactagtgttgttaaatattaatgaaattcttttactctttggggcaaagcaacatgcctggtgcaccttttaaaattactgcattgctgacaggtagcagagctgaacagaactgctaaacacggttatatttagcaaagaccattaagatgtttctttcattcttaaaattgcttgagagagagcacccttccttcatagattaccagtaatccctagggttaatgggacattcaatagatttacctaagaaaacaactggagaatttttgataagtagtaaggatacaccacagcccaatgtttccacagataaaaaatgcttagaaataagtaattcaggccaggaacatgggctcacgcctataatcccagtactttgggaggctgaggtgggcagatcacttgaggtcaggagtttgagaccagcctggccaaacggcaaaaccccgtctctactaaaaatacaaaaattaaccgggcatagtggtgggtgcctgtaatcccaggtactctggaggctgaggcaggagaatcacttgaacctgggaggcggaggtttcagtgatctgagatcgcgtccctgcacttcagcctgggtgacagagtgagactctgtctcagagaggaaaaaaaaaaaaaaaagagaaataagagatccagtggtgtacttgtaaatatttaactgctggctctctgggaactaacaaattaatactccctgattaatggtatctgctgatcatcatacatattcccatcatggcagatttcaaactaccaacctgacatgagtgaacgcagaactggggagagatagctagtaccacaacattatataatattcccaccatgcagatacatggatgtaaagcacctcaatagcatggacaatagaatgatagaatatttttatataatatatattatatataataataaaatatagcaatcaagaatgtatgctttaagtattatctttgtaatataatttatgtaattgaaatttcatacagtttcatttttaatagtggctttaacaaccattaattagcttgcaaaatttctgagatgttaactgtgagctctcatgggctactacaagctggcacaacactgagtccatacgaactgtcagactgagatctccagtagttaatcagaagccttgaccaaaacatttacttggcagcagtgtctgtttctccttccttccttccagcttcatttaaacatgccaatataagactgatctcaagttccacctttctatgtagaaatccatgattcttgtcacattaactccacaggaatctgttgggcacttggggctactctctgcagtccacattgtagcatcagttatgggcccacagtcttcctgcagagatagatgtaatgcaatcatgtaatgcaatgggataattttttttttcttttgagacggagtttcgctcttgttgcccaggctggagtgcagtggtgcggtcttggttcactgtaacttccacctcctgggttcaagcgattctccttccaagcctcccaagtagctgggattacaagctcctgccaccatgcctggtgaatttttgtgtatttttagtagagacggggtttcaccatgttggccaggctggtctcaaactcctgacctcagatgatccacccgtctcggcctcccaaagtactgggattacaggtgtgaaccactgtgcccagctgcaactgctttctaatgtaattggaattcatttacccaataaatatttaatgcctgaaatgtcctaggtacagttctaaattcatattggccaaaaacaaacaaacaaacaaaaactgaaaattatccctgctcttttgtagcttccacttatagttaccaacaggttatgaccccagagattttgtctggggaagcagtgatggccttctatgacctagatattaaagaaggataagtaggaaactaccaaacatagaaaaaagtggaatgcttcaagcctgagggattacatatagaaagataaagagggttgaaaaggctggctagaagtgttcagttaagagtttgatgagaagataggtaagaaggtggggtggggtcagactcggaagatattgtgtacgatctcattaatcaattggttcttcttagctctactgtttagtgctgtgttgcatatggttttattctgttctttagtcatgtttggggtatgctgtatctctctcccccaaagactgaaaaacctttgaggacacggattatcacacctttttaagttttttattattattattattttacagggcagagcacatagtgagttgtaaatagatgtggaattaaatttaaatttttagtcccctctccccttcattcctgttgtagatatacacacagaaaatttgcctctgttttcattggacttccacaaaatcttggctcaaagaatatacaggaagcagaaaaagaaaggagttgtgggttctgagaaagcaacttcttttctgctgcttcatgttttattaacacttaatggattaatatttatatgttcagtttattttgccccatcggtgggtttcagaaaaccctaagatgcttgacttagaaacatgaattcagccaagtgaagctaccctcaatgatctctggttggctacaagagcaataataccttctacctactttattgttcttctactttgacatttacacacccaggagtcttctgaaactccaagaagtagggaagcactgtttggacttcagataggggacctccttttctacactgctctgttactttcccattttgcatcagggagaagaggggaaagaaatagtagcggactttctttcttcattttattatggctaggattttaaagaaacacacaaaaagagctacagtgtagttttattttatttttagggaaataggggcctttgttttatctcatcaggaaaagtttgaatgactctatgtgtccatgtgaatggacatgtatatacttgtttcagagagggtgagtcattgtctttgttgtcatgtacttatttcaataattctactgtgacttaaaatgtatttttaacagcatcctccgcatttactcccaagccaatgtacctgccacattatttatatcaatacctttttaaacctagaatttctatttgctaagttgctattttgttctgttgactggactccaaatgatttggaattatttataaagctaaaagttcattttcaaaatatgaatatttaccctcactggggatatttaaaacaatgtgttatgactttctggatggcaatagggacatgtatatgtttgtgtgtgcctgcggttattttagcgtttgtacatatatactactatgcaatattcattttcctgacagtgactatgggtatgagagacatggggagagccagtgtgtcccagctttctggtacaatccagcatccccatcaaaggactgcagccttggtcaaagctaccttaacagcactgggtaagtaaaacacctacaggaactcagctccctgttttcctgtttctctaaactaggaccaaaggaaatgcattgctattgaatacaatggagtgaagatggagtctgtttataacaaatggcatttgaagggaagtgaggagttctttagctgagagtatctatttggggagcatcagaagagatttctgatcaaccagatttcaataactttgaatatttgcttatgatagaccatagttactgttttggttaatccttctcttctggaaggtcatgtagtcttattccttgacactcaagtgaattaaattcatacaagtgatgtgcagatattacactactctctagtgaaagatgaactgaaactctgtgacactgatgctgaaaacttaaaatgaaaattcaaaagttccattctaggaattcctggaataaaaatgtcaaggatccctttcaggaattctcaaatgacgtgtgtgtttatctctttgttcatgtattagttactctttcgcatgcttgaaaaacattttcttgaagatttgttgtcttgccctttcctttgctgcctctataaccaagaacggatttcacaagtggatgggtggtctaagacagcacctctcaaatgttaatgtgcctatcaatcatctggggatctttttaaaatgcagcttctgatttgggagatctggggtggtggggaaatttttcctttctgtgagctccgatgtgatgtcgatattgctggtctctggaccagagttgttctggatgccagtcttaactctcccaatggatcttctgtcatctcagtcaagttattcatcttcttgatgcttttgtcatagctagttgtaacataatcagttaggtagatgtagataggttgagtactatctacctaactgatgtcaacaaaggaaaaaatatgatgaaaaagaagtgctgactggtctgagatactctgaaatgcatgccaactatttagttctgggagggctattcctggagcctgagctaaggctcaaggatctttgctgttatttaattgtaggagtctagtttagggacttaaggcattcaaattgcagatccaacagcatgaagttaaagagattgtggtgtcagagaataaagtgccaggaagtttgaggaaagggagtattatgcgcacaagttattagctgggccaccaatttcccagtcagggcctaagctgaatgtgattgcaggttaaaacagaattataaaagaattgaattaaagcatttcataggatcatgtgacatgtgtaggtagaccacattttaagcaacttagttatgccaaaatcccaaatagctaacaaaataattcaggagaatgaaaaggaatggcaattaaaaaaaaagaaaacaaatatgctacagatgtctaccaatacctccagattgtgtaaatgttggcttatgtttacaaaatcatcaaccagcttgagttaatggccaattgaggctgaaaaagaagagtagatgatatcaagtttgtgttaggacatggtacccactgaaatacctatcatcagtaaaaactgagtgtcttgtaactatgcatcctgagaaagtataaattgattacaaatcttgactgtctagaccagtgatgaccaaattaactataatatgaggcatatatgtaatttcagattttctagtagccacattaaaaatgtaaaaaataaggtgatattaattttaataatgttttctttaacccaaaatttccaaaatattatcatttcaactgtcacactaatgatatttcaagtgctcagtagccacaaggtgcgctaccatattgcctaccatatggacaagtggtgctatgttaaccagaataactttagacccattataagctcagttgacaaaaaagatgtatatatgcaagaaaatatatcataatttgatctgagacagtaatgacatacaacattagcttaatatcccctgggatccctgaatggaggtatagttcagcagtggggtggcagggggtacccagggaaaatgtcaggtatgatggaagactaatatctttcaaaaagagttataaatttctctgtttttgaaaccaccataggaaggcaacatagatggatttgttaattattcttgacatagtgagtgaaagaagacaaaatgtaatgggcatgtaatggtgatgatgatggtgataataatgctgctggtgatgatggtggtgatggtcatagtggtggtgtgtttctttcatgtggttttttaccagaacatttgttttttcagtgcagccttatagatggtcatgtgcctggaaatatgcccatcatgcagatcagggttgtaggaaagctcttggcttgacttcatatgctggggttggtgggcaaggaagatgacatggtgtcattgtacataatgatgtccttgtcacagaaggtcatagtgctttgtcaggtgattttcccatgccgacctcctctataagataattttacatagtgggatagtgagattgaataggagtttcaaatctgtgcttctaatctggagtttatgctgagtgggaaatgaaatattagcaaggagaaaaaaaatgtgctctgaaacagcccagtggctccacagaaagggctattaggcattaggggaaggaatgatgccctggaggaatagggaagataggaatcagcctcctgattaatcagagttagaaaaagtctgatgttctacctgctttctggtacagagaaagctggagatggcctctgggagatagaaacaggtctgtccctcacaagtagaagcacctgcttttcccatttcctgagtccaatgagtctgcctcctcttttgttgtgtgagtcagacattgattttccttgtctggtttagacactgatccaatctgtggctcaccaggtaggatcaataataacgtttaaggagctactcttaccaagatggagggatagcaggtcctcagcatttgttcagcttcgtaaatgactgtctttttgagacttggtttccaggggccgctgtgtgaagcacctgttttgctcttgctctcttacattccctttataacacacacacacacacatacaacagcaacaacaacacaatcaacacaaaccactatcaattgtcaattctacttaggtatcggcggattgtgtccaacaactgcacagatgggctaagggagaagtacaccgccaaggcccagatgtgccctggaaaagcccctcggggcctccatgtggtgacgaccgatgggcggctggtggcagagcaggggcacaatgcaactttcatcatcctcatggaggaggtaggtgctcaactgggtctctgaggtcagaactcccaaccagaccattcccagaagggaagaagaagatcttacattcccacagacccctgcaccaaagtcaatggtgagaagctgaaatttctggaaagaagacagacaagggtgaaagagggcttagggtatttactgaccctcctccctttatcccacaataaagacccagtccgcagtgggagcccacttgcctctggagcatgcagatctggatatattcttcagggtctccattaaagtctgctttgctgaggaatatttattaccataagaccataaactgtaaacttggccagaggaaggaaatgtgaattttatctgttgcttttaggagcctcttttgctttattctgacccttaatcccactgattagaaaagcccacaaagctttcacaaggccttaaaagtaagagcatgaggatggggaagattattgaaatcctttaaagttatctttataaagaatgttgtattagttgcttttctatcagctagatgctgtattctttcacttttttagtgtcttctgaaatctgggcagtaaaatcagactacatacattgattccagtatgggaatatctctgttgtctgcttcttttataagctgttgaattgcttcctatactagggcattttaggcactctttgctgagtggtagagcaggaaggcttgcttgattgacacagccctctaaatttatatgcaaattgctctgtgctcttgagatcttggaaagaaggcaaaacaggccaggagtcattttttttcacaagtatgagcacttcagaaacctttaaaagtcaggagcacactggacagggtggtgaaggttccttatcctgggttgacagatttctcagccttcactcacagcaggtgctggaattaaaggactttaagattcagaggaggtcattatcacatttccactagggagtttccaggaccacagctataaaaaccttctcttgaatgggtgtgaagagccacgatcttatccgtttgaattgcctccagttcatttccactttaatttatattcataaactcaaggatagttgacattgtgtggggggcaagagagtacctatcaatatttcattcacatctgggctgccatgggggaagaaatggaaagtgaaactgtgatcagtgcacattcactgggcagaaggattggctcataattccaaaatgatgtatttctctctttattctatcactcatcttcatatatgaacagagcaatgctattcttcatataggatctttgttttgtggtcaagtgcattgtgttgatccaaagtgttggcccaatataatggtggggtgggggggtggggaccaagaagaatgaggttcagcatagacccttaagaagctaagtgttggcttggggtggtgagatgcattcacctgaatcattggcatcatgttaccaggtagtacacagagagctctttccaagagacagagatatctgtgaactgggacaatctgaaaaggcttcagggaagaggaggcttaagtagatttagggaagtccaaggataagagaacaagggtataatttggggtggtatgcagtattcatctgtagaatgggaatcgccatcctatccctgctgttgttttgcagatggtgttatataatatgtattaagtgagtagcataattctggtaacatagcaaatactcaaaataggagcaattacaactatagcatggcaactgagggcattattattgaaaccagactgggtctggaacctggtcttcctgtactcactatgaaactttggtctaactacttatttttgtccccagacaaatggggacaaaaatactttctataatatggaattatgaggagactgcttgcttggcactaataaaaaaaacctcggtaactattagctgctactatgattgcaattattattatgacacaaaaggagaattaaactatgtatgtgagggagtcagtgaaacccttggcttcccttcagaactttacagagggtctaccttgcccactattgtcagtgtcataccaactcagcttgccccgagcttgggcgatgaggacaataggtccatagtgcctgcccgtagtaccctgcggatcagataggagtgtgatcattgtgttgcaggtgtttcagccctttgggaaagactatgggtcatcagaggttgatgctgaagcaacaggaggaagcatcagataggagtctggctggaccaagtaaattgacccgtctgctatgccatcttgcagggtgatctacaaaggacaaacatccagcttgactttggggatgggattgctgtgtcctacgcaaacttcagccccatcgaggacggcatcaagcacgtgtataagagtgcggggatcttccaggtgacagcctatgcagagaacaaccttggctcagacacagctgtcctcttcctgcatgtggtttgtaagtaggaggcaccatccccgttttccctttgttcccagttggcaacttgctctgttcagacttcctaaaattcagagctgagcccaggttcagtgtgactactacaattacccaaaccaaatggtggagatatgtactcatctgtgtttctgagtattatggtactgaaatagattgattattttgaagttcggataacatattaccacctgggccgtccttttcagcaccactctgctctgatataaatgtgtgcgtgcacacacattcaggtaaaagtctcctctcttccttttggagaatcctcaaaatgaaaaagatagaaacaagccttctggttgatagtctcaggctcattctcaatctattatgaatgaagactgcacaaatcaaagtcaactgttatttgtgttgtaagagccagagaaggattaaagaaacatgtttagatatttttaatttagaactaaacacacacacaaaattaatttttacatacaaggttactgcaagttcattctgttttgacaattctaagaactctccaaaaatattttgttgtgctagaatctatttcattgctattggctgttgcttggcacaaaccaaaagaacagttggtgttccaaaatatttcatttgtgctggatgcattttgtgtattttctattctagaatttgatgcatgtaaactgaaactttaatattgtgattttaggatgtcgggtcgaggaaatgttgtcttggggctgggattggtttcccacatgtgtatcagtgatattcgtgggtctaaggacttccatggttcttacttacataccccacaagagtttccaggtaatatgctacatatagtgaaaatcataagttctgaaagagtctaagtgaaaacaaggagcaccctcctattaacaactcagtgatggcatcaactctattgtataaacaacctacaccttaagaggtccctggcaaacagtaagctagctagtctcctggctctccagtcacaatgccggtaaagggaccaaaagtggtaagggatgtgtgtgagaggagacctggattatgtagctcagtcatgtccctaaaaatgccaggctacatggccatgagataaatgatttcatttctcaatctcctgaactccaattttaaaatggcttaattctgactgctaccttgcctcgtggggcttttgtaatagtaaacacacaaaaaacacccaatcattcactaattaatttaacaaaaatttgttgaagtcttaaaatgtgcaaggcactctgctaggcactgggaggtaacaatgcagatatggccctcctcttacagagtttccattctggtggggaagtggggtgctgctacaaatgagccataaataggcaaagtggtgagaaccacaccacatcaactacaaccattctgtgtcagaagcaccaggtcagaaacccaggtgggtgatgtgcacggtgttcatgagcccaggcttcagaacaagggagatctgtgcttgaattctgatcacattcctttgttaaatgtctactattggtcaatgttcttagcctttataaacctccaatttcttatcttcattgctggctgggcgcggtggctcacgcctgtaatcccagcactttgggaggccaaggcaggcagatcacaggctcaggagatcgagaccatcctggctaacatggtgaaacccgtctctactagaaatacacaaaattagccgggcgttttggcacaagcctgtagtcccagctactagggaggctgaggcaggagaatcgcttgaacctgggaggcggaggttgcagtgagccaaaatcacgccactgtactccagcctgggagacagagcgagaccccgtctcaaaaaaaaatatatatatatcttatcttcaatgcttagctaaaagggaggctgtgagaatcaaactggatgaggtgtgcatgtgttgggtatccccaagaccaccaccaggtttggtgattcactaggcatacccacagggctcagctaaagtttcactcatgactatgattcattacagcgaaagggtacaaaacaaaatcagcaaagggaaaaggctcagggggcaaagtctagaggaaacgaggcagaagcttccatgagttttctccccacaaagtcacacaggacactcctttatccagcaatgagttgtaacatgtataaaaaggctgcctaaaacagaaactcattagagactcagtgcccatagtttttaatgggggccagtcatgtaggtaccttctgcctggcatataccaaaactccagattcccaatggaaagcattgggaataaaccatactgttttcaagaacagtttaggcagagtgaaccactcttatcagttaacggttgactggatgttcccagataccagcctggggccaacttacatgcagaccttcctcaggacagcaatttcaggtccatgttatcttttggcacagtgtgcagaatgctgcctatcacccagcttggtgcatgatgaattagagtatttactaagtacttcctattaactttgtacctgacatttttgctgcatttaaaaatgaagacaaagaaggaaaatgaacttcacattcctctattccaaggacttgcctcacccacatttctgattctgccaagagtgggccttgccttcagggtatgacaaccaatgtatcttactggcaaaaaacacaacagcaaggaagaggtttacactgtggcttatgtgcatgagggaggaaatgttccttgaaacttttatcgtgcttataattccctccaaatcaatcatggctgcattttccagatagtttttattgtggagactgctcttggccttaccctgggccattagctaacaaaagtagttgttagctgcccaaaataaccaatctcgcacagattattagatttttatcaaaaggggcactatttgacagtgaggaatttaggacttttctctgttccttcctgaatctgctcagctctcatctcttctcattgatccttggtttgtctccacatcaaagcccaggggttcctggctcagaatctttgccctaaaaaaactgctatatggtagtgttccttaggattatttttaaccaaacatgcttgtcctgaagctgaataaatgcaaccatgagtgatggtctttcaagttgtgaacgccacatcctttttgtgtttggtgtgagtttatggagaagggggtctccttttatcttcttgggtatcagaggatctgacactgtcagctttcactgagccaaggcccccaagtgatagaaagccaagaagaaactcaaggccatgaaccatagctgcatcattgcttaactgtggaagatcccagggttcccatgaggtgtgttggggaatgggcttcatgctttctggaggatagcagtgagaagagaagcagtgactttgaaggtaaaagggtcccctaaaggggccccttttctatcaggagaaaaatgagagatttgaatctgggcatggagaaagaagtttttcatctccccccttggatgtggactagccaggagccccgccccacagcctctttctcttccccattgatgaataaaacacaaactataaagggacatagattaggtaaactcctaaaaatgagtaaataaagcaatgaaagtatccattattttcccacatctagtgcctttttacctcatgaacaaacaaatcatacaaaaataataaccaaaatttccttatttaaaataagtcaaccttcaaccagacgtgtatctgaattgacaaagttgaaagtgtttgctaagagaaatcttgagatgccatatgtttggggtcaaggcagagcgctttaggcagaaagcattctcacactgtagatactcttccttttaagtattcggttttattttatttttaatttttgtgggtacatagtcggtatatatatttatggggtacatgagatgttttgatacaggtatgcaatgtgaaataagtacataatagaaactagggcatccatccccctcaagcatttatcctttacacatacactggcctggcttgtctccccacccaaatagcagtcactgtccaaacactttccccttcaacataaaattacctatgacacagaatatgtccagttagactcaggagaatgctcactgaagtccttagagggactactacccaatgacagaaacagtgatggcagtggtggtggtcggcagtagtggtagaaatcatgacattctttcattaattgtatggtactttaaacaaccacataacacattcatatgttcttattaatataaggaaggcagagcaaatgttgtcccttatttttagaacaaggtaatagtctgtgtaggattaagactcataagataaaggaaaaaatcatatgggtacatttgtgccagagttgaaatgagaaacactcatctgttttcttccctttgaactgacttgtctccagaattaccagggaagcaaataaggacggctagatggcctgaaaaatcctccaccaataagaattcaaggcccccaggctgaagagatgtctttgctacagttgtggcttaagaacttcgtatagaaatctcttcaattacttgttcttatcaaattgatgatggtggaaaccaagaaaatgtgctctgacataataggagagatttacatattttagttggatttgtttatgtaggaaggattaaagaagagaaagaaggagggaggaagacagaaatatagaaaggaaagtaagggaaggagttaggaaaggagggaaaaagggagaaaaaatcttgcagtgttaaaaaactatttacctctcagatgcaacaccgataccttaacactttttttttttttttttttttttttttagttaacatgaagttttgctcttgtcgcccaggctggagtgcaatggtgcgattttggctcactgcatcctctgactcctgggttcaagtgattctcctgcctcagcctcccaagtagctgggattaaaagcggctgccaccatgcccagctaatttttgtatttttagtgaagacagggtttcaccatgttggccaggctggtcttgaactcctacctcaggtgatccacccacctcagcctcccaaagtgctgggattacaggtgtgagccaccgcgcccggccgcattaacactgtttcatcagctttgtcctcttctcattttagtttggaaagtaaaatcctcacttattgcctagggtgtgttcatgtatattcttctacttgctagtttagaatatcatgctgcttatatcagttttctgagggaaaaaataagaagcttggttacctttctgcaagcagatttcttattatttgggaacctggcatttgtttctagtttgatttagggagatatacttttccctgtttggaaaacagccttgccagtttctgaatgacacccactgtatactgcagatgatgaggcacaatggccaattgttgaaggagatggaaacccattaacaatcaagaataatggaagagccttccatacaatacactgaccccaaatcacaatacaggctaatcatcaataacaaaatagactgctgtttatcttcccatttattggctaagtgtctagtaaatcagctttgtccttgtattagaggttcataagcatctgtggttagacttatcagatgtaaatttagttcagatgccactcaaaaaatctgaaacttgatttgagttccctgttatattcagtacttcatttcaagcgtgtatacacacctcccaatgtatatggttttgtgacccttccttttttacaggagatgcgaatagaatttaaggttaagaatctaggggtgtgatacagtttgaccacatccagaatataaacactgactttttttttctgtttccttaggtcctgtggagcatgttcatctccgagttccatttgttgccataagaaataaggaggtcaacatcagtgcagtcgtgtggcccagtcaactggggacccttacctatttctggtggttcggcaatagcacaaaggtttggccctttctgattgatgtcaaattagatctgtactgaatgctcctatgttccagcttttatgtgtctattagggggcactgagaatgcaggcaataagaggtacttaataaacctatgagcccacaaaattgaataaaacatacctctttacaccaagttcattactttattagggaaagttcaaataatcctaaggaagaaagagtactttgagaaactctgcaaacctgcatgttcttgcttctctaatcaatatttctaaaatttcattcgttccattttgctttaatcttggccttggcctggttatataatgtcaaagaagttacttagcatctctgagattaagtagccctatctgtctagatatctaaatgtagggttgccaaaattaaacaagataacccaggtaaagaatccttatcaatacttactagttgttctagaaatgctagcattcttttcaggcaaggtgctgaggttgccacgtctcaaagaaaggaacaaaagaggccaaactctggacttgccatatactccctacttccagccatggtgatggcaacacctgtgtcaagcatgaccacaattgtatgatagaagctgggagcaatttggctgagaattcctcagaggtaatgttcttctctattcctgttttataaagaacacttcatttttgaggagttgtaagttcacagcaaaatcaacaggtggtacagagattttccatatatcccctgcttccacacatgtatagcctcctccattatcaacatcctccaccagagtgttacatttgttgtaatagatgaacttacattaatacatcattatcactcaaagtccatagtttactttagattcatttctggttttgtagattccataggtttggataaatgtataatgacatgaatctaccactatagtatcaaaaagaagggtttcactaccctgaaaatgctctgtgctccacctattcttacctgcctcctccttaatccttggcaaccactgatatttttactgtctctgtagttttgccttttccagaatgtcatatagttggaatcatatagtatgcactgttttcatattggcttccttcactaagcaatatgcatttaagtttcctccatgtcttttcgtgtcttgatagctcatttcttttcagtgctgaataatatcccattgtctgaatgtatcacagtttatttatccattcactcattgaagagcatactggttgcttctaagttttggcaataatgaataaagctgctataaacgttcatgggcaagttttctgtggacataagttttcgactactttggataaatactaagagcatgatttctggatcttatggtagcaatatgtttggttttgaaataaaccactaaactgtcttccaaactggttggaccattttggatttccaccaccaatgaatgagagttcttgttgctccacatactcactagcatttggtggtgtcatgttctggattttggtcattctaatagccatgtaatgatatcacatttttgtttaaatttggatttcccagatgacatattatttagagaaatttttcatatgcttatttcccaactatataacatctttggtgagttgtctattaaggtctgtggcctatttttaaatcagattgttccattacttattgagttttaataattctttgtatattattggataatcttttatcagatatgtcttctgcaaatattttcttccactctgtggcttatcttttcaacttcttgatagtgtcttttgtagacaaaagtttttaattttaaggaagtccagcttatcagttctttttttcatgaatcatgccattggtgttgtatctcaaatgacttctccatacccaacatcatcaatgttttctcctatgttgtcttctaggagttttatagttttgagttttacatttagatctatgatccattttgagatcattttttaaaggcataaggtttatacctagattcattttttttggcatgtggatatccagttgttcaagcaccattttttgaaaataccatttttgctccattgtattaactttgctcctttgccaaaaataagttgattacacttatgtgagtctatttctgggctatttatttggttccattggtctgttttcctgttttttttcaccaatacaacctgttttgatcactgtagatttataatagatcttgaagttgagtagagtcagttcttcaactttgttctccttcaattttatgttgactattttgagtcatttgccttgccatatatactttcaaatcactttatcaatgtctacaaactaacttgctaggattttgatgggcattggattgcatctatagatcaaattggtaagaagtgacatcttcacaatattaagtattcctatccatgaacatggcatatctgtttatttagttgttatttgatgtctttcaacagagttttgtagtttttcctacatggatcttgtacacattttgttaaatttatacagaagaatttcatttttgatggtgctaaagtacatggtattgggtattttatgtttttgttttaattggtatgtaacactactgttttttatatgttgattttgtattccgcaactttactgaatttgttgatcagatttaagagttttttcatggagtctctaggttttctaaatatacatcagcaacagggaaaatttgactctttctttttaaatgtagattggcttttatttttttttctcttgcctgattactctggttaggacttccggtcctatattgaataggagtggtgaaaatgggcatccttatcttcttgttctaggctttaaaggaaaggctttcaacttttcctgattcagtatgatattaactatggatttgtcatatagcctttactacattaaggtacattccttctatgctggttttttgagactttttatcattaacgatgttaatttcatcaaatgctttttctgaatctattaacatgatcatatgttttttgtcattcactctattgatgcaatgtaccacatttattggcttgtgtatgttaaattatacttgcatccctgggataaattcaagttgatcttgatgtatatttttttctgacgtgctgttggattcagtttgttagtatttcattgagaattttcaatcctatattcatcgagcctattggcccatagttttctttttttgttgagttcttgcctggtttgagtatcagggtaatgctggtcttgtagaatgagttagggagcattccctcctcttaaattttttggaatactttgtgaagagttgatattagttcatctttgaaagtttgatagaattcagcagtgaagccatctgatcatagacttttcttttttgggagactttttgttactaattaaatctcattatcagttattggcctgtaatcaggctttctatttcttcctgattcagtcttggtgggttgtatgtgtctaggaatttatccattttctctgggtttttcagtttcttagtgtatatagttgttcataaatgtctctaatgatcttttgtgtttctgtggtatcagttgcaatgcctccttttccatttctgattttatttgagtctttactctttcttggttagtccagcaagtggtttgttgattttgtttatcttttcaaaaaaaccactttttggtttattgatcttttgtattatttttttagtctctattttgtttagttctcctctgatctttattatttcttatcttctactaatttggggttttatttgttcttgcttttctagtttcttgagttgcaggttgtattatttgaaatccttctgcttttctgatgtaggtaattattgctataagcgtacctctcagcattgcttttgctgtatctcataggttgtggtatgttgtgtttctgggtttttttgtttcaaaatttttaaaatttactgtgtaatttctttcttgacccaacattcagaagcatatcatttaatttctatgtatttgtacagtttctaaagttcctcttgttattgatttctagatttattccattgtggtctgagaagatacttgatatgatttcaactttacaaaatttgtttagacttgttttgtgtcctaacatatggtcgatcttggagaatgttccaggtgctgatgagaagaatgtatattctctagctcttggataaaatgttctgtaaatatctgttaggtccatttggtctaatgtgcagtttaagtgaaatgtttctttgttttccgtctagatgatctgtctaatactgaaagtggagtgttgaagttcccaactataattgtgttggattccatctctccctttagatcaactaatatttgctttgtatatctgggtgctggggtattgggtgcatatatgtttagaattatgatatcttcttgctgaattgatccctttatcattatataatgatcttctttgtattttttgttttttatttttttttacttaaagtttgtttctttgatataaatatagctactcctgctaattttcagttttcatttgcatggaatgtattttcccatccatttactttcagtctgtatatgtcatgacaggtgggatgagttccttgtaggcagcatattgtggtcattttgtgtgtgtgtgtgtgtgtgtgtgtgtgtgtgtgtgtgtgtgtgtgtgtatgtgtgttttaaatccatttcattagctttaactttactgaggaaagttaatttgcttactttcaaagttattgatatgtgagggcctatttctatcatttcattaattaatttctggttgttttgtatacctttgtcccttttctttctctcttattgtttatcatagtggttttgttttgttcttcatagtgataacatttgaatcttttatcttccttttttgtttgtttgttctaccagtggcttttatattttcatgtgtctgcctgcctgccctgccctccatcactccctccatccctcctttctttctttccctttctttctttctctcttttctttctttctctctttccttctgtttcttctttctttctctgtttcttgctttctttcttgctctttctctctctttctctctttccctcttgctttcttgatttctttctttatttctctttcacaggattttcttaagaatttctaatatggcaaatctagtggtgatgaattccctcagctttgcttgtctgggaaatatttcatttcttcttcatttatgaagaatatctttgctaggtataatattcttggttgacagtattttcctttcagctgtttgaatatgtcatcctattctctcctggtttgtaagatttctgatggtaaatccactcttggttgaatgggggctcatttataagtcactagatgttttcctttgcctattttttgaattctgtatttgtctttgacttttaagagtttgactataatgtggcataaagaagatctttttactttgcatctttttggaactatcggagccttctgaatctggatatctaaatctcttgctagacttgggaaaagtttcagcaattattttgttaaattgattttgtaattatttcattttctttttatcttctggcataccggcaatttgaatatttgctcattttatcatgttccatatagcacataagctttgctcatttttaaaaattgtttccttaacatttttgtttgagtgggttatttccaaaaacctgttttcgggatctgaggttctttcttctgcttgatttagtctattaaagctttcaaatgtattttgtcattcatttggtgggttcttctgttcagaatttgtcttcattttttttaatagtgtctctttggtaaatttctcattcatatcctgaattgttttcctgatttcttttccttgcatttttgaatctctttttatctcacagagcttctttcaaatcaatattttgaattccttttcttggattttataattgttttgtttgattgggatctgttactggagaattattgtgttccttcagagttgtcactttttcttgctttttaaaatgttttctgtgtccttacattgatatctgtgcagctggtataatggttacttcttccagttttttgaatttgcttttgtagggagggactttttcctgaagatgtttttatggtgttggttgaatagggcactttggctttgattctgggtgcatgcattagtatagtgtctgtgtgatttattttgccttaaatagaatcagtggcagctgtgattcccttgctggattggaggcagttattagtggaggccatggaaattttttgctggggactgggatgtcaggtgggccagggtctggggtcctagggtagcagcagtgggctgattatgcctatttaggggcctcagagcagtgtacgttggccttggtgttagaaggcccaactgcactgattcctgggccttcaggtgtcttgctggtagtcatagtggtgcaccaggtgggtgagtgggttctgtgccccttgggcaggaggtgtggtgtaggtgatagtagtagcaatggcaggataaccctctgtgtcttgagcagtttccactgatgttagtggtggctgcaatgggttagtggtttagtcttcatatctacaattagtgaatacagatgggtgccagctctggtggtagtggtaggatggtggacccaacctggtggtagtggcagggtggtgtgcccaacctcaggtgtctgggaggagtgctgaggtactggttgtggtagactaggcagtgtgatcccgagacccttgtactctcagattgagtcttctggcttcaggggaggcagagccaggctaagaagtcctaccctcaggctccctggtgttgtgtgcaggtactggctgtggtagacagtggtagggtgatctccaaaccccaggtgggatgcttaggttggggagtgggagtggttatgctgctgccctgctactggagagggcaggggtgcttttagtggtgggcagggttgcttttagtggcagccatagtcaggtgggtgggaaatacatattttgcttgtatcttagcctaggtggcagaagcttatatttcacttgcacttcagccacctcattggcaactggttcttcactcatatcttagccttgactgtagcagcccaaacttcactaacctcccagcccacggcagcagcccacagtaatggcagctatgggtggggagaggggttctgtctgggtgcaataaatgcacagtggctctgatgctggtggcaagtgtgatcattgccagtggcctgtgccttagtccacatagcagcagctaggtgcagtggtgactgtctgtgggggatgtcaacagggctccaggaataaggagatgtagtcgctgttgggccccagagcaaggcaaagtctgttgggagctaggttctcaaaatggcaccttgctgcagctgctttggacttgggatgtgtggaactcagtgtgagctccctctctggagcacggatattgcagtctccagggagctgcttatgtcagtttcagggcccacaatggtcaagaggctctccagtggctagggttgtaggagtccatggtgaggatgtggacttctggaggtctctcacttgcccttttctcatattggggagtccctttccacattggggaatctctccaaactcctagccgatcctggccaagcaggctgccttgcttccatgtccttcactgctttatgtgcttcctgttacttctctgttgaactccaggattctttcttagatgacctattcaaagtgtgattgtctagtcactatttttgtttcttctttgtggagaagaccagtatgagctgcctttggtcagccatctttaaactccttggtatcgtgtttttaattcaaatcacacttgttcattgctggtatacaggaaagtgatcaacttttatatatgaaccttgtatcctgtaaccttgctataattatgtattagtcccaggagatttttgctggttgttattgattctcttagatgcctacataagcaatcatatcatctatgaacaaatagttttctttcttctttcccaatataacttttgtttattttcttgtcttattatgttagccaggacttccagtacaatgttgaaaagaagtggtgagagggaacgtccttgctttgtttctgatcttagtgggaaagcttctaatttcacaccattaattatgatgtttgctataggttttttgtagatattctttatcatctcagggaatttcccctctattctaagtttactgagagttgttataaatgggtgttggattgtgttaaatgctttttctgcataggttaatatgatcatgttcttttttctttagtctgctgatgagatggattacattaattgatttttaaatgttgaaccagccttgggataaattctcatagtggttatgtagtataattttttatacatgattggattcaatttgctaatgctttattgaggatttttgcatctttgttcctgagaattattgatctttagttttcctttcttgtaatatatttacctgattttgatatttggttacatttggtatttggtatttggttgatggttgattttggtatttggttcattaaatgagttagaaaatattttatcctcttctattttctgaaaaatgatgtggaaaattggcataatttctcccttaaatgtttagtagaattcaccagtaaaaccatctgagcctagtgttttctctttagcaaagttattaattactgattcaatttatttaatagatatagttctattcaaataacctttttcatcctgtgtgagttttaacagattgtgtctttcaagaaattgatctatttcatctgggttatcaaagttgtggccatagaagtgtttatcatactcttttgtcaccattttaatatctataagatttgtagtgatgtcccctctttcatttcggatattagtaatttgtgtcccctctcttttttcttaattagcctggccagaggcttattaactttattgatattttcaaagaaccagattttaaaaattgattttctctattgatttcctattttcagtttcattgatttctgttctagtttttattatttctttttttctgcttaccttggagttttttttttcttgtttcctgagatgggaggttagatgactgattctagatacttctttttaatatatacactcaatgctataaatttccttctaagtactgcttttgctgcatcccacaaatgttagatttgttaaattttcatttagttgaacatactttttagtttctcttgacatttattttttgactaatatgttatttagatgtgtcttgtttaatctccgtgtattttgggactttctagttatctttctgttaattatttattgctcaatttaattgtgttctgagagccgacattgtatgatttctattctttcatatttgttaaagtgtgttttatggcccaggatgtggtctagttcagtggatgttctatttgggctttagaagaatgtgtattctgctgttgtctgataaagtaatctatagatgttagttatatccagttgattggtggcattattaaaatcaactatgtccttattgattttatttctttttttgtatatcactcatactttaaaaaaaaaaaactttttaaagtgattgccctagaatttgctatatacacttacaatgaatccaagcccattttaaataacactataccacttcaatagtagtgagagtggcttttagtaaaaataattctaaattcttgtctcttgcctcttctctcactgttgtcactcatttcacttgtatgtaaacatacataagatatatacataagtatacataatcaaataccttgttggtatgtttatgttgaacaaattttttttctgttaagtcaattgagaataatacttttctttctttttttaattatactttaagttctggggtacatgtgaagaacatccaggtttgttacataggtatacacatgctatggtggtttgctgcacccatcaacctgtcatctacattaggtacttctcctaatgctattgctcccttagccccccacccctccttgacaggccttggtgtgtgatgttcccctccctatgtccatgtgttctcattgttcaactcccacttatgagtgagaatatgcagtgtttggttttctgttcttgtgttagtttgctgagaatgatggtttctagcttcatccatgttcctgcaaaggacatgaactcatccttttatatggctgcatagtattccatggtgtatatgtgccacatcttctttatccagtctaccattgatgggcatttgggttggttccaactctttgctattgtgaacagtgccacaataaacatacatgtgcaagtgtgtttatagtagaatgatttataatcctttgggtatatacccagtaatgggattgctgggtcaaaaaattttgccttcatttattcttcttcattgttctttctttcttcatgtggttcaagtttctgacctatatttccttctgtctgaagaaactttaatgatttttgcaaaacagatctactgacaagtttcttaagtttttctttgtttgagaaaacattcttttcttcttcacttttgatggataattttgcagggtacggaattctagattggtggtgtttttttccctcaaccctttaaatatgtctctctactttcttcttgcttacatggtttctggggagaagttggatataattcttatctcttctcctttataggtaaggtatttatttcttctagcttctctcatgactttttttcttaatctttgattttttttgtagtttgaaaatgatacatctaggtgtagatttttcagcatttatctgtctcagtgttctctgagttttgagtgtctgtggtttggtgtctgacattactttgctatgattctcagttataattatttcagatttttttctgtttctttttctgttattcacattacatgcatttataccatttttagttgttcctcattcttggatattcttttcctttttttttttttactttttgttgtttttgcttttcagttttggcattttctgttgagatgttctcaagctcagagattcttcctcagctgtgttcagtctgctaaaaacacatcaaaggcatttttaaatttcaggtacagtgtttttgatccctagcatttctttttttttcttagaattttcaactttctgtttacattgctcatctgttttggcatgctgtctaccttatccatgaaatcttttagcacattaattaaatttgtttgaaatttctgcactggtcattgcaacatccctgttgtatcagactctgatactttctctgtgtcttctatgttttttccctttagtatgccttgtaatttttttcttcacagctggacatgatatactggtttgaaaggaatggctgtaaataagtctttagtaatgtgatggtaagctatggaaggaggggaagctttttatcaacctgtgattagttctcaggtatttacaggtgtttctgtttgttctccctctcctgatccctcaggttgattagattagctagagtgggctgtaggtaggtatctatgttctcccacatggaaggataaagtgggctggtgttgtgtattttacttcccgtagcttagttggactataaaacccctgaagtttagtctctgatttataagtttcttctgagagcagaccttgttaaaaagaatgtagtgctctgatgtgtatttcagaataattattttccccctcccctgatataaccatatgggcaattttctttaacatttgttgggagtatgtggtcacctactggtgataaaattcacaaagtgaaggggcttcctatgaatccccctggagttttgaactctcagactgtgtgtgtgtgtgtgtgtgtgtgtgtgtgtgtgttttgaaaactctggttttttttttttaaactcataatgtgattggcattgcttatcctagagaaagctttaacttaaaaaccataatttaagtaaggtacgacctcagacttggaaatgctggatatctaaagagaagggaaataaatattcagtttctggtggataacaactgaagagaaggtcaccccatccttactcctgcataagtgggagataacttatccccagtcttttttagggaggcagcacgatatagtggacagaacatggaccttggatttagggtttcatgggttaagtttctagaactgctacttcttagttgtgtgagagcttgataaagttatctgtcctaagatgtaattgactcaccataaagtggaaataataatgcctatctcaactttattgttgtgaaaactatgctattttatagcataaatatatagtaaaactatactatttacttggcacacactatgtactcaataaatgggtgcttttcatgatgttattagaacttatatttagcatgggttggtaaaatatagagcaagattcatggaccaaggaacccttttctgtttgcattatatgtgcctcatattttcaaattagtttctccgtatagatgactaatgcacttgcatttctgggattattcttcaccaggaaaacagaaggataggtcatttaataaaagccctatttggtacatttgagaagttaagctccctgtctgaggtgaacatcccaaattcaaacacttggttagttgcagagccagacctcaaaactgggtctactaattcccatttatcatgcactctccccagtcccagatgctttagctgcactactagaggtgtttatctcctggaggttacataatctaaaattgtgcctcaaagaccagcagatatacatagtgaaggaaaaagagaaaattgtttagggagaagttagaaagaggacgattttaagttcatttctcctgtgcagatgtgagggtttggctgtcaagtcagagaattctttcttgttctagctcatttacctgatgatgatcttttctaagaaacttctgtgtgcaagaagggcagttcttgactgttaccaacacagtgatttacttaggggcctgtgaggaatggaagacacaatgtttctctacagctctatttttttctttgagtgctgtttctaagacctgaaatgccatgcagtgtctgataggtatatgactaaaaacaaataaatgaacaaagcaattggggattctagtttatacttctgtaataattatctgtgttaaattgaatgagtcacttaatttgagtttgtatcgatttctctaaagcaaggatactataatatgtaatatatgaacatgacttagttattatttgaaatctactgtgtatctctctgtctctccacttctctatcaagcaatcaatctatctatctatctatctactacctacctcatatatattatgccatattatgagaaggcatttttaaattacatactggcattataattttatgttttttaattaatggtgacgagaggtatttccttggttaggaatttttaatccaaaagcttgaacatgaaatgctgcacaaatacccaggtcccaaaggtcttactaagtggttttgttcccaaagaaccaagagaatgacaatacatgagaggcagtagaatggagtggttgcagaacaagacaaacctaggttggagtccagaccgaatcttctttgctgtatgcctttagtgaagtcaaaccatttaatttctttgagtctcagttttattgttggtaatgtctgagtaataacagtagtatctatgatcaagtattgctgcaaggattaagtaaagaaaggcgtagaaagtgtttagaacacatccgagcatttggaagtattagtcactgttgtgcccatcatttgcattaatagcatttgtatttaggctaaaaacctgacttggttccacagattacagtttaatttctaaaaatgtttacttggtccatttgaaagaggtgcattttcagtgcagtgctatttgctaacaccatgccagaaacacatcaagatggccatggtccccagtagttgatccagtgagcactatatttggctggcaaatgaatgaatgtctctgcatatatggggagtgccgtgattttagagctgtttggttccctttgaccagcaaactgacctgtaaaaggaactagtactaattttgagcatatatttctggtacgcattgtgtactgagggattttattgttatcagaacatcactgatgaaatagaaattatccccttttacagagaatacaattaaggaaataaccttggaaggtgatgttttatggctgttttatgtgtttgtgttggtgtgactaggttactatgtaagtagttaaattaaatcatcctactgataagagtgaattggcatcctgctttataatcagacttttgctcgttgatattagggatagaaaaacacatatgacattctccataccttcaaggagattatgtccccaataagaaagcacaatgagcacatatgcaataattgacaagcaaatagattctataagcaaacaggaaagagcaagaatttctgaaatccaactgtaggctcatgtgcctacaaatctatcagtgggcaatgtgaaatttcatcagtacttttgtggatcttttttaagagcctgtcgtttgtgctacatgttgtgtggaatgcaaagcagtgtaaattccatttgttgctttcaagaaacatgtaatctatttgagaatataaggctaaaattcaagaatagataaaagcaggtatgcaataggaatgtaaaattactggctaagtcaggcaggctggggagtgatggatatgcagacattgttgatcatggagtgagtgagtcatatacaaagttgagcctaagctggcatggaaggagcagtagaattgaggcagagaggaaagagagggatttttgtgtggaggtcaggctttggggatgatagactaattcagccaaagttaaaggattcatttgggcagaagttggagaaaacgctgaaaggtgaggaagacagatgacagatggctttgaatgataaaaattgatgcttttgcttttgtcacaaaaattctgatttagggcagcatgatataagatagaaccagattcatggacagtaatactttagacagatactgtcaaagagtttttagatgtatttaagtgcgtatgtttgtgtatctgtatttgagggaaagtgcttttttaacctgtgaattttcacattaatcccataggcataaaagtatgggagttttggtttactaccttcaactatttatcatcttttcccacctattaccaccagtcatttttctcctttaaaaacacacaaagacaaaggaataaagccaaatagaatctataactatcactttagctttaaactactagtttactgtattatttggctttatttctttgctttattctttaatagcatccatagctactagtttagttttaaactaaactagtgaatagaaccatgaatttggttccatcttatatcactagtttagttgagttttagtttaaaactagtagctatagatagtattttgctttatttctttgtatgttaagattttttatatagttctaaacgtggtagatccacaattatatatccagcctttgtacctcatatgatgagcactttgcacacattactatataatctgctgaaggttttaaataaggcaagcatagtgactgcatagtctgtccaatttgggactggcagctgttatcaaggtatgcattttaagttgcagagattttaaagtgtacaatattaacttgacttactgtgtctgggaaactgatgtaggctgcatccaaagatttccctgcagcttgcttagttccatttgtcaagtggaaatctcataactaaatagtcacacagagctttgtcgatttcttgctgggctcagtggataatatgtgacctgtcgcacatgagggattctctgtggggagggatgtagctcacagcctaggcagggcatgaggtatttttctaaggggcctccctgtgggctggctctgtagattggatgaagcacagagacagagaagtcaatcagctgcctgttggatttgtggggctctgaaaggccaatttgctgggattaacagaggtctggcttaataaatgtgtctgcttgcctaatatatttgagtagatgaaccttaaaatacttgatttaatttagcattgggcaccagatatcagtggctgatgaagaactcaagaatcctgttgagtgttccagctttgcaaggaaggtgaaatcagccatgctgccataacagctgatgagaaacaaaagcaatttggaaaacaaaattagctcctgccattttcccagcacaagagtctgtggcttgccacctggggaccaagtgttcccattcagcacagtttgtttgctgtggctgagtgccctgactggctggcaggagggcacatactctcttacttcagatggcattccctttgccctgcatccctgcacccttgctgggccctggatctcctagggaaacagccagatggaggagacaagatcaaatctgctaggacaggaagaattccatcactctcaaaagagattccattgcccaagacagcaccgaccagctgaatcttaagagagggcagaaaaaggagagagggccatgtatgctactgagagctgaagaagatgagctggaagtagtgaagattctctaaagagaaaactattaagggagaaaaatgcctggtggtgataggtgggaaaagatgagaaatagctgaaggcagtaaaacaaaacggaaaactgaaagaactgtgcagtgaacatcaacatacacaccacctgtagtctaccattagtatttgctatgcttgttctatcacatgtctatctgtccatccttctgcatacatccattagtctatcttgatgctttattcatttcaaagtaaatttaagacacctatattctttgtcctaaatgattcagcttgcaaatcattaaccgtagttgaattttttttatacttttagccctgtgggggtataaatcctatcaacaatggaatgcaaaattcaacagtgtgtacttactgagttttggaaaagacattcacctgtgtaatccaaacttcctgaaagtcctctcatgccccttctaagtcaatctccagcccagtcccccttctcagtcaatctccagtccagtctccagaaccaaccactattctattttttcatcataaattagatttgctggtttggagatttatccatactgattatatacacacacatatacacacacaaacactgaaaaaaatatatatatatatatctatatctatatctatatatatctcagtatttatttcctactaaatctcctactaatgaattcctgggctgtttcctattttgggctgctatgaataagccactatgaacatttatttttttgtttgtatacttgtgtcttcttttctcttgactaaattcttagggttgcagttcccaaatcataaaatatacatatagtacaactgatggaggatttttcttggccccttcactgaactcgcagcagtggtgttccctctacctggcccaccatgcttgtgggagggagcatgtgagcgagttagtgtgggatctggccatacactctgggtgctgacacaggagcaagctccatggagggcccatggccagaccaggtgtatcacctcagggggagcgcagcagccccaggtgagggtgctcacaaccctgaagccccagagggggtgttagagtgcacctttagctctaccatctgcggacagtggcatgttagcagctcagttggccccttgccttgtcatgtggggcagctgccctctgccactgcgagtaaagggccagtgtgacagtctttctgggtacccacactcggtgggtcctgaactcttgtctggcatccaagaagaatgaggtcacatggatggttgaaggatggtgaaggcagagaattttactgagcaatgaaaacagctctcagcagagaggggagctggagaggggacaagaagggcaggtcatctcctccctgacttcaagtcaggctgtctcctcccagaagtcaggccgtcgtcttctctaccaactgagtctggggtctttataggcacaggatggggattgtgtgctgactggtttgtgaatatgcaaaaaaggatcaagtgaagacaccattcaaaggtgggcatgacagtgtagaaaaccaactaggaaagggtaggtatatgtaaagtaggtgaagaatagggatcaatcagagaaagcgcaccaaacagggagaaaagttttcaatccagtccaaagatttaacttgtaacttggctttcaggctttaaaccgtctttagcttggaggtggggtttcactgggtacccgcccctatctgcctaggcatttggctgcctcctgtcactgtcacaccactttggaaaaagttattgcaatttcttataaaactaaacattttcctaaatcattctaccattttacatttccaccaaaattatatgagtcctaattgtcctgcatcttcaatattacttgttatcatttatatatatatatttatacatatatttatatatatatttatacatatgtttatatatatatttatacatatatttatatatatatttatacatatatttatatatatatttatacatatatttatatatatttatacatatatttatatatatttatatatttatacatatatttatatatatttatatatttatacatatatttatatatatttatatatatttatatatttatatatttatatatttatatatttatatatatttatatatatttatatacatttatatatatttatatatatttatatatttatatacatttatatatatttatatatttatatatatttatatatgtttatatacatttatatatatttatatatatttatatacatttatatatatatttatatacatttatatatatttatatatatttatatacatttatatacatttatatatttatatatttatatacatttatatatatttatatatttatatatatttatattttatatattttatatatttatatatttatatacatttatatataatttatatatatttttatatataaattatatatatatttttatatataaattatatatatatttttatatataaattatatataatatatgatatataaattatatatataatatatatgatatataaattatatataatatatgatatatattatatattgtatgatatatattatatataatatatatttatacatgtatttttatatatatttatacatatatatttacatatatttatatatatttatatatttatatatatttatatatatatatttagccattctgttgggtgtttagagatatctcattttctttttaacgaatgtagcaaaggtaatgaaccaattgaaggttttgtgtcagataagacctgatggactgaccaatagaaactagaaattttgcctaaatccatttgtcaatgcaacattctgattgctgagtcctcacagatcacctaacccaaaccactcatttaacagataaagaagtaaaggccagaatgcagacaaactttgcctaaggatattgattcaaacagtaacagagtgagtttcaagtcactgttctaattatactagaaatggtgactctgtgccacacatgttgatattcccttattccatggccctgagctatgctcagcccagcttgacttcatctctcttctccaaacaggaccataaacagccactattgaccctttggattttatatgcatgtcagaacctgcttacacctcatttatcgattaattcagaaggtcacacccatgtgtgtgtcatcacccagtcataagtatgggaaagaatgcctgaactctgaggtttgcccttagttaagggaaggagtatatccctttccatactccctttcttctttcatttaccaaatagaaaagaaatatgccagatgcttaggacagtatctgtaatcctgcccaactccagccatcaacctcgtcataaaacagagctatagaattttaaagcagaagaaattaaattattgtttcaaggccagttgaaaagtctgagctagaaaggaatttcagtattacagtagggacaccatctgaaagctgcagctgggagcctctgcagggttttgtacacatgcatccaagccatacatgggtatgttgtgaaggactgtcctgcccctcttaaagggcagctctgtgcttctgcagctggctacattgctactctccatcctgctgtcgtcctgacacaaagagaggagagagagtctgctcatctgcccctgtgacatctctttatcagctgccttagatcagcctccaactgttacgtcttactttccaaacagtagagaatttgagagggcactgactttaagatgcccagtgaataatgactcatcagactgaagatctgtactctcttctctccaataagcatctgctttttaatcaagattcttctttccaggaaaaaaaaatatatatatatatataattagagctgacccttgaacaacaagggtttgaaatgtacaggtccacttatatgtgggttgttttttttcaagaaatacagtcagccctccatatcgtcaggatccacatctgcaaccaaacttagattgaaaatacagcatttgcagaatgcaatacctgcagatatggagggtctacagtgggattggagtatgcatggatttttgtatacacagcggtcctggaaccaatcctctgtgaattctgaggtatatctgcattctatttctgtcttcatccttgagaacttcctatatgttatgattattgggggaaaaacagaaagaaaaagattaataaatgatcacaaatatgtttttttgtgtattttccaacctattaaaaatggtaaaaatgccttgcaatgggaaacacacatataatataaaaagtcagtaatctgatggtgcatctaatttacatatattttctgctctatgaaaggcaatgtgcggccgggcgcagtggttcacgcctgtaatcctagcactttgggagactgaggtgggtggattgcctgagctcaggagttcaagatcagcctgggcaacacggtgaaaccccatctccactaaaatataaaaaattagctgagtgtggtggcatacacctgtagtcccagctactagggaggttgaggcaggagaattgttagaacccaggaggcggaggttgcagtgagccgagatcgcatcattgcactgcagcctgggcggcagagcaagactctgtcaaaaaaaaaaaaaaaaaaagacagtgtgcttagggtgggtaatacagaagtaaataactatgtgatcacttctcagaaaggtctcataatccagtgaaatataggatgaaaatataagtgacaccagatattggaggagaagggaaatgatctcctattcccaaagtcaacagggacaggttacaaaagctgtttctactttgccccaggagaaggagcagaatgacatgcaaaatccaggatgcccagtcttatccttatttctagaatttaataatttataatgtgtttcaagtatactaatactcttcctagatactggaagaataatcacagttttaagaaacggtataacgtttgtttgtttgtttgtttttcttttccaagttaggatgacagtctgagagtttcaggaaaggaaataaagttgatatcccacacaagactgaatgagtattgttacttcttcttgtagcctctcatcactttggacagcagcatttccttcacattccttgcagaaggaaccgacaccatcacagtccaggtggctgctgggaatgccctcatccaggacacaaaagagattgcagttcatggtaagccctgaaaattgttctgtgatgctccttcccgctcagttaatctcctgtgtccactctccctacaatcattgagtgtggtggaaattcctcaggccctgggaaaattacataggtcaacaggaagcttccaaacctacctccgacctagagattgaggttataagagacgtataccacaaacaggtatttgttgtcccctgtgttatgtctgcctcagaacttgtttggggttcttattagacaaagacacgtatcacaaattgaaggaaatgcaagctgggaggtatctacaacatatatgcaggacacactctttgtgagatgaggaccagcaatttccaaaagtcaggagtcatgatccctgccttgtaggactcattgctcagttaatgagatgatctctattcacaacagatggctttcttgattgttggagatttgaatatcattggctgcaaaactagataataaggctaagaatataagttaggactagggcagaagagggtgaataggactactatcctgttctcaaccctggagaaccactgttaagtttattacaaatgaaagtgcctctactgccatttcacacaacctctcccaggtccctagacacaaccagtatcactgtggttttcttttcttttctttttttttagatttttcattactagtttgatttctttaatggtaattggttttttggttttacatgtcttcatttcatttcttcatttcttcttttttttatgtattatactttaagttttagggtacatgtgcacaacatgcaggtttgttacatatgtaatgtaaatatcactgtggttttctagaaagttaagtgaaggcttgtgatcctctgatcagattatgttcctccagcctcacaccaggtaaattctttttcctacctttctgcaaacttgcttctcaggctcttcgaggggcacatggaaggtttgtgtgtttctttcaaagtaaacattttaattgtattgtaaattttatacagaagcgtgcagggcacaagtgtttagttttatgcattaccacaaagtgaatgcacttgtatactcaccaaccaggtcaagatacaaagtttaaacctattttctaatcctcagaggcagtttctagcacaatgggtgaagggattaaagaaggagaagtgaaaagactccattccaaccaagtccaaattgttaatgctttgtgttggctcttcctggtaccacctacagtagcagacgtctccttctggagtttcataattgtctttcatttcagataatatacaggaagaaaggcttaagatcttagacactaacaaaaactggtaggagcacaaatctacttttaatcaccaaattctactttatttcagaagtcaggaaacaagctgagaacaaggaattctagcagaagcctggtgaaagagtagaccttttaccaaaagcacagtgatggtggagctccacacctgtcacaccctctctcttctcactctcccagcctcacttaaacattctctctccctgcagaatatttccagtcccagcttttatcattctctcctaatctggattaccacaatcctgacattcctgagtggagaaaagatattggcaatgtcatcaagcgagctctggttaaagtaagttggctttgtctttttttaagttcttgtgaataaagaaaagaactagatggtgtggtccacaatacattggcatggattgaaactgcattccacagttaaagattatttctctgtaaaaagagagagaagaggctgggtgcagtcgctcacacctgtcatcccagcactttgggaggccaaggcaggcagatcacttgagaccaggagtttgagactagcctggccaacatagcaaaactccctctactaaaaatacaaaaattagctgcatgtggtggcgcacacctgtaatcccagctactcaggtggctgaggcatgagaattgcttgaaccggggaggtagatgttgcagtgtgctgagattgcgccattgcactccagcctgagtgacagagcaagattctgtcaaaaagaagaagaagaagaagaagaaaaagcaagaattgtaggattaaagaaggaagaagagaagtataaaagagagtctagttcaatgtttgaagaaggaaactggcccaatgtttattatgaatttgtttgagataggggcttgatccctttaatgcactaatggatggacaactcactgagttgttgctaatattatgcacttgtctggctctttgttcaccaataggatcttctcaaccaaacatttatactcacaagactaccgttggccacagattgcactcagaaggctacaggccaggaaacagagcgttccagcagggtaatagaattacagagttaatccaaggtcaaatttgccttagagaaagtaaaagggttttgttaaacattttctcagaggtaggcactagaatatattgatgaataaaacatggtcaattgaaatgtagaaataagtctaatgtataagcagctctaagctagaggcatggccagcatctctatggggcagagagaacagtatgattcacgctatccagggacatgaagacttggcacagatttgcaactcaataaatacttgttgaactcttggaacatctttggagagaatacttgaactgtgtttgcaaggataaatgtcagttaacaggggcaggatggtgtttgaatgagcagcatgttcaaagtcatggactataaagagtacagcacactttgggaggccgaggcgggtgtatcacctgaggtcaagagatcgagaccatcctggccaacatggtgaaaccctgtctctactaaaagtacaaaaactagctgggtgtggtggcgtgtgcctgtagtcccagctactcgggaggctgaggcaggagagtcacctgaacccaaaaggcggaggttgcatgagccgagatattgcgccactgcactccagcctggtgacagagtgagactccatctcaaaaaaaaaaaaaaaaaagagtacaacatatttgggaaatggcaaagagtttggtgtagccagtctgtaggttataagggcaagtgcagctaaaattgagctaggatggttatgtcatattgtgtagggtttgagagaccaaaagaagcttggcatctattctgtaggcactgggaagtatgaaaagtatgaaaagtattcttttttttatttcagtaagagaataggtttatatgtcagtaacccattctggtggcaatgcatagttggggagacatttcacaaaaggtgaccagctaaaagaccactgcagttatctaggccagaaatataaggtgctcaagaaaaagaggcaaaggctacttaaaaaattgaacaatagaattggtgactaaggaaatgtcgtgtgggtgagaaggagagagaaattctctgataacaagagccagtaggagatggccttacattaatcaagatggggactatgtaggagaaacacgcttgggaaacaatagtgatttgacttttaatgtaagtctggagcacatgagaaacaactggttgaagatgaccaggagggttgaaaatatggatctgaagatgaagcagaggttcatgctggagggagagatgtaagagaagaggctgtggaggttgttaggctctctaaagaggagttgggggacaaggcagacacactgctggtggttccccaaggcagaggagaaagatccaggaaggacatggagaaggagctgacagataggaagaagaataaatagaagagaatgacataggagcattgctgtatggagcggtctgtaagagtaactacacttcaaatctttttacaaagagactattcatagaaagagatgagaatgagggctgggagcggtggctcatgcctgtaatcctagcactttgggagccgaggcaggtggattgcctgagctcaggagtttgagaccaccctgggcaacacagtgaaactccatctctacaaaaataaataaaaaaaatttatccgggcatggtggtgcatgctggtagtcccagctactcaggaggctgaggcaggataattgcttgaacccaggaggtggcagttgcagtgaactgagattgctccagtacactccaggcgacagagtgagactccatctcaaaaaaaaaccaaaaagaaaaaacaaagaaaaaatgagatgagaatgagactgttatgtatgctgtgttagtctgtttgggctgctataacaaggttccataaactgggtggcttataaacaacagaagtgtatttctcataattctggaggcggagaagtacaagatcaagatgctggtagatttgatgtctggtgaaagccactttgcttattcataggcagaaccttcttgctgtgtcttcacatggtggaaagggcaaggtggctctctggggtctcttttataaaggcactaatcccattcatgagggctccacccttatgacctaatcacctctcaaggccccaccctgataccatcacattggatattaagttttgacagatgaatgggggtggggggtgcaaaaacattcagatcatagcatatgtctttggttgcaaggcatccagaattgggttgtgttatgtatggttacgttcattaaaaagatactagctttttaggaaataacttgtaattgcaataataataatcagtcctgtcagttgattctcagacctcaaatctcacaaggaccaatcactcgtatgtccctttggatgggttaaatgaatctgtatacactgctccaaggtctctgtaagggccttggtggactgacactccctgacattgttctttcctgagacaaagggtcacaccagtcaaggcactaataagctcaccacccaacccttcactgcattgggtggttctctgcattttgcccctagtctggcctcctgagacttgctttaaggtagttaaaggcccccagccttatggacttgggcattaggacttaatgctactaaggatcatgctttgaaagaatgttgaggcatctagctaaccatctcaggccgttaagaggatgcctccctggttggtggactctttaggcttctgactgctgcttcttacttccctgcgggctggctctttcacttttctttatcacatccctgagagttaactccaatccgtaagcctaattccaaataggaatcagagctgagcaaatggaaaacaaccaaactctctgcttctgttcaatctagcaactatttatttaatttttactctgtgtcaagcattcttgggaacagtgagaccccagacagaaatatctgggcaatcacaccataagaacctgtattagtccattctcaaacttgtatacccgaaactgggtaatttataaagaaaaaaggtttaactgactcacagttctgcatggctggggaggcctcaggaaacttaacaatcatggcggaaggcaccccttcacagggtgacaggaaagagaagagtggcagagcgaagggggaaaggccccttataaaaccattagctctcatgagaactcactatcatgagaacaggatgggggaaaccacccccaggattcgatcacctccacctgattcctccctcaacacctggggattctggggattactattcaaggtgagatttaggtggggacacaaagcgtaaccatatcaggatctatctgagaaaagactacaccagacagatgtaatcatgtgtcacggtggacatggtctatatctctgaaatgcagtggacatggtcatttggaggtgtttggggtgggaggctaaggtggagatcactgcaggtagagatagtcagggggcactttggaggatgggggtatttcacctgattcacaaattatatatttggattgacagaagaggtggtgatgttctggataaaagatcttcaggagacacacaggaaagaacaagcttacccttcacgggggagaactcagcatcctgttttctttaaaaatttgccttcagacagaagcttacttttaagtttttatcacaaagcaatatcattcttttactaaccactcaggaatagaaaaattcactcgtattctcagcctcttaaccacgtttagtattttgttatttttttcttctatatatttgtatttttatagagttgtaaccaaagaaatgtaaggaaatagattggaatgcagctatcataagtatttttctatgttgtctcatagtacttattatcatcttaatggtggcataatagtctatcaggtgattataccagtatttgcttatttttttgaatactggaggttttcccctttatttactattataagtaatgttgtgttttttcctgcatatggcttttcctatattttggatcatgtctttagaacaaactcaccaagttacagttactgactgaagggtatgaatatttttatggcctttaaattaagtctttcagaaaacaaattggcaatatgtatcaatttctagcactgccagtgccaaatgagggaacttccttcaatgcagtcttaccaatattagctattgcacttaaaaaaaatcctgctttaataagtgaaagcaagtattgctcggctttctttaaatttgcattttcccatgttggtttatgacttctttttcctcatttgcacccagcctgtgtttcagccagaagctctagctctcatagaaaaatggaaaatatgagaggaacttttgccaatgttcccagcaaataatgttttaaaaatcatttgtaataccattctagtttcagtaaaaatgtatataagagcaggggaggtagtgaaactaataatgttttacctagcaggtctaagggaaaaactgaaagaaagcctgaatgtatattggagcctgtgcctaaaaagctgcatttgaaaaactcacatgagccatctggctgtgcacactctgctcttgtcattgatttggggagggctggctcctccacagcctctctttgtctgaacatctttgcaggtaaccagtgtcccagaggaccagatcctcattgccgtgtttcctggtctccccacttcagcagagcttttcattcttccacccaagaacctgacagagaggaggaaaggcaatgaaggggacctggaacaagtaagtgaaagtaaatctggctgggacccttgcctgcaccctacaccctgagagggcacaaagctgttttcagccagaaagggagacaggctctcttccattaccccaacagccaaggttttgaagagcaatcacccttacccagagtaaatacaggtgcaaatagactggagcattcagctactcagaaaggaatgtcacccctggcattattcattccaatgtctgacatccctgtgccagctcatgtctccctcccagtgactcttcctgggattcaggggaaggggagcagcagagagagagagagagagacagacagagagagaaagaaggggggaatttgaatttccttgtttatttctgggactatgtgcctcttgtctttaaactgcactggcccttaaagatcctggccaatgttaagctctgcttctggggagaaaatgaactgccttcaaacatgattttttggagagggatgtattgcctctctttgctttaactaaggaagcaacatttccaaaagggattgtgatttactgttcttatcaaatgggcatatagaactatactgtgatctgcacgctgtcctggaagtaaaggggatggcaggactggtgtttctccttttcatcctctattcctcctgaggtcttaatgcctgcactgtttcacccttcctttctttctcatgatgctaagtcaggtgcaatagaaataagtgagcatgaggctgcagaaaatcggcatgaatcacaaacatttgctctcatatgaggtaatcattgtacagacatattttgtgtccctgtgatactcactggccatcaccccatccttacttacagccatccacagacattgagcggtagagatgtgattgcagtttctctgagaaataatttcttgcattgcagggttgcatattgaagttggccagaaataaatttagcttcttaatgcatacatcacttttacaagacctctttattctgaaatagcaagtggcatgtgtgaactatatttggaagctacaatatccatccatttagataaataggtaattacagtgatgaatagcagctgtgatattaaggcgcatacagcgagataagagttagggacaacagcctaagtcggcctcagctttcatgtgggaattacagagtgattaaatcgatgttatgtgttctgcgacttgctagggaaaagtaaagaacaaaaattatcccataaaaaggaggcagcttctgctttgatgtttgcttcccattgtctctaagatagaaaacgcagaggagagggctggtagtatatgtacctgctttaatcctggcagcggcctacatcccctgtgtctatgacttcatcagattacagagctaatgatgggttgaacttctttcattggaacccataacaggtctttttagagggttataaaggcatggataaaagagcagtgaattaggagttgaatgaaacatctatgtctattatagctctaattcaccagtgactgtaggcatgcctctttctgtctctcactctcctctccagaataagcaaatattaccatctatagttgtctctcagtatacataggagaatggttctaggacttctgatataccaaatctgtgcatcttcaagtcctgcagttggccctgcagaacctgcatgtaagaagttgggcctctgcaacatggtgaaaccccgtctctactaaaaatacaaaaattagcttggcgtggtggcacgtgcctataatcccagctactcaggaggctgaggcaggagaatcgcttgaacccaggagggagaggttgcagccagtcaagatcatgccactgcactccagcctggcaacagagtgagattccatctaaaaaaaaaaagaagtagttgggcctctgtatatgcaggtttcacatcctgtgaatactgtattttccatccacattttgttgaaaaaatccacatagaagtggatctgcggccaggcgcggtggctcacgcctgtaatcccagcactttgggaggccgaggtgggcggatcacgaggtcaggagatcgagaccatcctggctaacacggtgaaaccccgtctctactaaaaatacaaaaaattagccgggcgaggaggcgtgcgcttgtagtcccagctactcaggaggctgaggcaggagaatggcgtgaacccgggggggcggagcctgcggtgagccgagatcgcgccactgcactccaacctgggcgacagcgagactcagtctcaaaaaaaaaaaaaaaaaaaaaaaaagtggatctgcttaattcaaaactgtccgcatgttctcactcataggtgggaattgaacaatgagaacacatggacacaggaaggggaacatcacacacctgggcctgttgtggtgtcgggggaggagggagggatagcattaggagatatacctaatgttaaatgacgagttaatgggtgcagcacaccaacatggcacatgtatacatgtgtaactaacctgtacgttgtgcacatgtaccctaaaagtataaaacaaaacagaacaaaacaaaaacaaaactgtatagttcaagggtcaactgtacttccttggtttcacaaggccccaagggctgtgagaaccaaatcgataaatatttttcactatcttatccctaattgaaccatggtgactttttacctattgaccttgtccttggtttcttaccccatgagggagcatcattgcatgtcatgtcaccccatgcatcctgtcttattttttcagattgtagaaacactgtttaatgctctcaaccaaaatttggtccagtttgagctgaagccgggggtacaagtcattgtgtatgtcacacagctgacgttaggtgagtgccactgggaactggggaaatgggaaagaggatctgttatcccagagagaaaaggaggagagaatcatgaaaccctgctgcataatgtctgaaagtggctttgtagaagggtcctttttgtagttatggttcagaaggattggtcacatcagtcacattgttctgaaggcatcctgcaagaagactttcttaggagtagctttgccattgaatccctagacggtctcggagaaaacctacaatttacttgggtcttaaccttattcgtttgtttgtttgtatatttctttattttgtctgtgacagttgggattatattggacagtcctctagctctcttcattcattcgattatctgattttatgaatcttggatggtaggccacagaactttaaaactcccttctagtttacaatgtgtgagtcaaagtagaaacaggaacaaactctagttggcttatttgtgaaaaaatctaaaaaggcatgtcccattgggcatctactttgggctctctgggaaagcctgtttattaaatggttcttaataatgtaagacttttccaaggtgtaggtcacaaatgtgcccatccagtgggtttttatcagaacagtgtaaaggaagagaatgaaacactgcattagtacttaacccaaaatttcaaatgggctccctgtaattatggtgacaggcatgcagcctatctaagagaaagagcactggagcccttattccactcccctgagctggacatacgttgttcaatttataccaagaactagcaagtttccccaggctgaacagagaagtttactttccctaagaagctgtactcaggtgccattgccatcattgaagccagactttctgcacccagatatcaggcaggggaattggagactagacataaggatggagatcagtggcctccttcctgcaatgaatactccctccagctaacagcttccaagtgagcatatctgttcttttccttatctgttcttctttccaagctccattggtggactccagtgctgggcacagcagctcagccatgcttatgctattatcagtggtatttgttggcctggctgtgtttttgatctacaagtttaaaaggtatgtcctattatcactcaatttagtagtggggttggggtcattgcaaatgattcttcctataactaactttactaaactcatcgcaagaatgtgatttttaattctccttgaacttctgtttgacaatgggtaaaagcaagaatggttgagggtcatggattaaatgggtttgagactctgaactctatctattatgatttataggtgtaatgagttaggtaaataaagactggccaatgaaatcaatttattatcttcaagagaagtgtaaggggttttcaaacctcaatcaaacttctaaagtaaggtcttatatattcagaagatgtttttatatggatcaacatccattcaggtggttaaatagggaaaatgcaactaaaatttgatacatacatgtacagacaccgatgcatttttttacctcctgttgcagctattcagcatctctctttaaatttgcatgctaaagatattcaactaccatccctctccctctttttcctattctaaagagaaattgattaggagaacaaaactccacatgtcttgagaaattatttttgaaagccacagaaggggtggtataacaagatacttattagaaacgtaaaattgaaatcaataattttgtactaacattcaaattataacttctactaggatgtatactaattaagagtataaactctgaaataagatccaattttaacttttagcgtttgtaaccttgggcaattgttatttgcctctctaagtcttaatttcttcactggtaaaatgagaatagcaataatattttataggtttgctacatgatttaaatgtcatagtgtgtgtaggtgctacgaactaagtaatcaaaaaagctatgctattataaataacaaagcacatgcctgccaaagatgccctctgtgccataaactgtcacataataggccctcagaaattttatcagtggcctagaaatgtgctccctgggaagcctgggtaaagtaaaaatgtcattaattattgtcagatgagtttgaaagcctcctttagtcctggagtctttccaggaactaaagataatgcttttaggttttggtagagatcagtggtaaaggtgcttgactcttcctgccccccttcttcctgcttatctctcctttagtggctatttcattttcttaaaaacaccagtttaattcagtatacctctcagcattagccgcagcagcaggaattctatcaacaccctccacgctctctagaaggacagagtgagattcaccttcctactcaacttgtagaccagtatgtgagttcatgtcctcttggatcaagatgtgttaacccacatacccctgttccctttgaagggtggataaaacctttatgtcacaaagtgagaaaaggttcaatatagaaacagcctggttaaggcaacacccatttatttatagatgtacttcaattatatgcaaagaacatttcacttttcactcagccaagaatttgattgtgaggaagcctggtggttgctgggcgtgacaatcaactaaaccaaatgtctcatctctgactcccagagcagcatagttgctgaggacaagggccaatagaagtcctgtaaagagtcttttgtggcttttgtgtcaggtggatccaaagtaaggatacttaaggatcacttatactgtgacttggaaaacttctttttttgttttgttttctttttataaatgctgttaaactccttagacggtcaacttactaatgtaggcatctttagatgtatacactttaataatgaatccataccaggtaatgacatctctaaaaaattctacctttgtagttcccaggtatcagcccaccttttctgtgtccctgacagtgagtcatgcagctgaggccacaggaaataaactccaatcaaactggacaatagcagcatcagttaacagtaactagtcatcagttaacctttacttttctggctccttttcctggaagttttactcccaatgcttaagccctttggttgaaattctgtgggattttcttttatttttttggtctcttttccccactcatcacatggaaccccagtaatggcaacatggagtgtacctggctcacaacaagtacgtaggtcaggttcctagccctggattcccaaagtctcctttgcttctttcattactatccaatagaactttggcaatgtttaaaatgctctatcatcagtactgtttaatacagtagccagtagtctgactgaggaactgaattttaattatacttaactttaactaattaagtgtaaacagcaacacctggccattaaacgctctgttgagcagcacagtttagtgtaaagacatttctgtttctgtgtccagatcattggccatactgagtttccagatccaaagcttcctctctgtaattgccagtattaacacattaagacattcattcatcctacaaacatttattgagtacttcctgtgttccaggcactggaaatgatctcagtatcccaagtggtcacttgacatagaaaaagagaatagaattactatgagcctcaagcttcctttaaatgagtatcacctggcctctcgcaggctctcttgctcttggatagtgactgctattttcttatatctcaagtaatgtaattaaaaatcatcatgagatggcttttctttctgaagactgcctaacaagaatttctttccataactgaagatctgctttttctctatccaggaaaacatttgagcttctatattccttccactgtttttttaggagggctttccttatagtccaaagcccactttgctttctctaaatttcctcctacaggcttctaacactcataatagatggataaatagatacaaactgcagttgggttttgttttttgtttttagagggagacttgagcctatccatattactcctcttatttaaacctgtatgaatgttggtccaagacatatctcttgatctcttcatttcccacattccttgtatgcagaagtggagttcagacttatattctcaacagtcctacaagcggatgtgttaagaaatgaaaagcaacttgacaaatttttaaaattatgcaaattgagatacaaaatttattctcttccaaccatcgattgcaaaaagatgaaaaatatgccagtttttagatgtgttatttggaaattgaaataaagcgaataatctctataagggcaagtttatccaaatcctcataggtattgtgagaaaagcaggaaaggggaggcagttgactctggttacaactgtgaagtacacaggcttatgtgatcaggaatggtttaaccacccccagacctaataaatattacggttgatcccaaccttcatgagcaatatgtacttttatgattgggaggaatctcagttattagactgtattttcatttatataaaaaggaatataaaggccagcattaatttttaattataccacatttagagagcctagtgtgctgcctcacatggatgctgttcactttgggttcttgtaaattatattaaactggcttagaccagtaggggtcatggggacacctcctttagtgtatggaaagcaaacattaaagacatgaaaactgaatgtaaaaaataattagaagcaactaagtgttttaaacctattttcagattttttcttctgaattagctgcaggaaacccgtattaagtgcttccacatttcgcatcatttggagttggagcagataggggaatgtagaagcttgagaataccactgcttggcacaaggacaacaaagtgattttcctttagagttgcatgggatgtcctggattaggatgggtgtccgatgtcccaagtttcagtgatatctatgctagtaattggctttgtgaaatgtctagacattagtctaattttcccatcctttgatgaggtaagaggggtctcttctagaagtgatattctaaaataaaaatataatctttttattgacaaatatagtatagtaaagtagaaagagcacaggatttaaggtaatttattcattgattcaaaaaatgcttaataaatgttaaccatttgccaaacactgtgctaagtcgtgtggatagcagagaggatagaaaacatagaccttgcctacatggggctgttagtatagtgggacagaaagacagaaaacaagtcaataaacattgcctattacatcaccctaaaccaacaccatatttatttcttacataggcagtgttgcatcgtttcatgtttataatggaaagttggatagtcaggggaagcctctcagagacgacatgtaagccaagctctgagaagagcagagggcagtgtgttacaggcagagggaacagttggttctaagtccccaagatgttgaagagctgcttctattagagtcttgtaactcaaaatttgggtctccaactgatgaacagcatcagcatcacctgggagcttggcagaattgcagaatctcaacccatccagtccagacttacagagccacaattcacattttaaggaagactctgggtgatgcttaagcctgttaatgtttgagaagccctggattaaaggaatgcaaaggagtctcccgaggctggaacacacagtgtgtgaggagataatgaagatgggtcagaagatgaatgcctcaagaagatttcagtgtgaagccgctcacttctccaaccccaagctagtctgccttgcgtttccaaatcccacctactatgtttctgtctttgaatagagctatttagcttctcttaatccttaatcatctccaaaatccaaaaagaaactattgtcatccccattgaacagatgaggaaactatccaagtatttaaggtacttatcccataagtgatgctctgaaaattgtagcaaaagctatgaatctattatttcttgactatttattttaaaaaagccaatgtggattgattaaattgatgcaaccttagaaataggtgtcttttcactctgtacacacttagagtttcaaagtctagctcctttaaaaacttaataccaggtaaatatttatagggttttattatctaactgcctttttgtttataccttcttgttttttacccacaggaaaaggtgcattcctcagggagttctatggtttacatcttccctgggcatctgggttcctagctggctttgtgttccttgaccttgtagcctcattgtctctggggttaccaatatctttccctgacatggacccttcctattaatagcttcttcctccccttatcccccaggatttccagctgcccaagtttggcacaccctgtgatcttaacctgattttgctcctgtcccatgtaggaaaatcccttggattaacatctatgctcaagtccaacacgacaaggagcaggagatgattgggtcagtgagccaaagtgaaaacgcccccaaaatcacactcagtgactttacggagcctgaggagctgctggacaaagagctggacacgcgggtcataggtacatgctcctgctccactaagctcccctgttctgtgtcctctaaacactggcctgcttcatctgtcccccatacattactggactggagggtggggacaaacaactacctacagtgacagaatcatgttttaaatttgtctgccacctctggccacaggaaattggcagatatttttccccttagaagttaatcaggattggaaatactggagtctgagtgggttagggatgaagccaactatccattactgacgggcttttacttctttttctataaagcaaaagtattatatgtccttactaatgattacatgaatgtggaatctggcatcagatagccctggatccatttttcttgctctgctaatctactacatctgtgacctctctgtgcctcaaattcctgatcggtgaaatgggagtagtagtacttatgattcatttctatttctgtgtagtacctaaaaaaaacaattctaagactgttgtgataatgacctgctgttatgtcattagcccagtgcctgccacatagtaagtttcaatacacattggctgttactgttgttatcaatagaatataagatagcagtcaatgtcttgatcccacctgtgggctagtgtgggaggtagcatgttaaacatggatgacataagtcagtgagctgataggtaacgatatccgggtgccttttaaataaattcctattaagcacctgttctgggtggcttggtatttagcagtgaataaaactaagatccctgcccttgtggaactcacatccatttctccctgtgtcttctcttctctgcaggaggcattgccactattgcaaacagcgaaagcacaaaggagatccccaactgcactagtgtttaataccagcaagccacgtggtcaaccacctttctgactttttatttttgatgattactattactattattatggaaaaattaaaatgtcttttttaccttttgtttaccaagggccccttcataaatagcaggcaaatgcctagctttgggagaaaagggcattcttagctgattgaaatgagacaaagggaataaatggctgtatttgtgctaagagcaaaggatgcatcttcccacagcctcctcgctttactctgccattggtagcttaaagactttctttttccttgtggtctcccttttttcaaaattgaagttgggttggctctttgtgaacctctcatccccacagcagaatcaccaacactctccgcttcccccagcacacacacatacaacacagatcatttcccagttagatccgcaggaagtaggttggtgggggtggatgtagctgcagaaagcatgcacaactttgtgaaagaggccctgccttgtgcatgtccatagtgaggctacagatggcttattgtatataattacaatgtaaatagctttttatttcctaagaaataatttaatgtttagtaaaaaagaaaacagaaaaaagaaagatgcgtgtgttggcttacgcactggccctcagagctgaccaacccgccaggcctgctcaatgcattgggtttggatgctctcctgttgtctgtcacacttaactcttgcatctccttgtccatgccatagctggtttctacttatgtatataaaggggggtggggggaggggcttctctggggcaattgataaaggaaggactctagtgacatcatagaacatggcagtcgtttttgttccaagaatgatatgaaaggtgaagaagaggcccactagaggcttcatactgagacccagatgggggaaaacagcttcctctctaaaaggaaaaacttgatatttatcagtctgagaaaatatttttttctaaagaaggcagtcagtggatcttaaaatgacaatctgtttttaaattggattctatgaaaatgcataatgcttatggtgaattctcaggctattctgagctcagaaaagtcccctgggcactaggtaaagcccagtgaatgtctcttggcatgggaggagttaaagaggttggaagggaagaggcatttgtggaattatgagttcatgcaaaactctccaggccaagtaggggtctagcctttaatgatattagtcaaaggcaattttagcaaagctgtgctatttgcttgtcagatgtacacaacttccttaaagtcaaatgtctgccttcagttcccttaaggtagttcttgcctctggggtgagtggctttcaaagccttttagcttttccagcacctcagccccttcacacatttacacataccaatttttttcaatagggtcacgttaagccatgctgtaagcattgtttttattttcaggcttagcctgagcacacttatttttgaaaatgatataatgtatatatatgggaggaaaggccacattttgtacctgttaatttttgtgggatgttgttcccattcttctttgtgagacagagagaatgtgatatagagaaatctggctggctacagtgtagatcagtattaggaatatttctaaagatcctgcttttttgtttcaagggttaaatggggcagacaattgcaatacttgtactaaacactggaatacaaatgcatgactcatatctatatatacagtatatgtacatatactgttcttggttttattgttccacttgaatatttctactgtaaaaaaaagacagtggttttgaaattgttgaaaataaatgtatttttgtacatcaaagctacatacgtggctgagttttctctttggggagttttctttatccactgtgtctgtaaactattgctacagtgatgctacatggaaaacaatgaatggcttataacaacagatgcttggtttttgctcatgaatctttaggttggctctggtttggctgaacatatcaggactgaccaggctctgctggtctgatctggaaggaggtttcaggtagtttgagtctgctccatgaattatcatcatcctggaactgcagctacccagggcatgttttttcatggtggattgtagaattccaggtgaggccagtagaacaaccctatgtctctaaggcctgggctcaaaatggtcactttatttatcttcatccacattccgttgactaaagaaaatcacacagccaagtccaacctccatggctagagaaatagattctttctactctggtactaggtactataattggaaacaataatctgatttactctgcctattcattttccactgccccatggagcgctttcactaaatgacctatttgaacccatgtcaaagtttttcattcacatatatatggctgggacctctgagcaaaggtcttggtaattgcaaggtctttgagtttgatatgagttcccaatgagtggtagagatgatggaatgccaagtcaggtatgaagacttattaagcaagagcaatgaaaaggagaaaaacaacatgtgtccgttttttttccttcttccagctgttcgatgcatgaaaccgacagcaaatgtcgttttttggttctttgcttattagtggctcttcttcaccaggtaaataaggaaatgtaaactgggcacccagaataagggctgtaagttggatgtttcttcttatttctttagtgtttcaaatacgtgataaagttccatggatctaagaaaccagaaatcatttgttgataatttagttgcatattttggaaagtggctcaatcttctggaatcatattttctgcacttaaattgaagataaagaactaagcaaaggtggttttcttttgatttgggaatttattttaaaatcatgtataattcttactataacttttcttgagttatactcaccttttgaaaaatttatataagtacctgcctcacatattgagaatatcacttaagtatctcaaaaagaagcagggggttttcttggtctaagtgcctatacttcttttagggattttgacagtttggagctttcaaataatgtaaaatgtctattatttctatcctaagccaaagacgaattttctaaatgcattagtttttgcttcctaatgggatctgagtttttcttgttaattttatgcccaggttggtgaagtttcttccctggattaagagagatgaaagagaaataaagcagtaagaaaatctgagtcagttgggtcatttgggtaagccatggctaagaatatagccactatattcaccatcagcatgagtttgttagatttctcagtagtagactgaggcagaggcagatagcagagagtgtggttggctttgcagctatttccatgcagggcttctcaccagtggtgaggacactctttgcatcagaattgcctttaagggaattgtaaagctaataactaggcccatggaagcactccagggctgtattcttccaggattctcatgtacatgaaaatttgagaataactgccttatctgccactaaaatagttcaggaataagtattgggtaaaagtcacgtcctttgactcctgttatcataatgcaagttaccttaatctacagaagtgagaacagcttccaaatttgctcatttcttcctgggcaacagctgcaactttgagagtcgctcaatgagctatctgggacaaaaatacactgtgagttaaggtggtgacggattgtgccttggaaagaatactgtgctggaaattagtagatctctaactttcagcaagtaattctggacccaagtacctcattcgtaaaaggaaaacacttcatggcccgccttgctggcttgttttgatttccagaggtgtgaaaagcacattgccaattccagaagtatggcagtattaggagaactcccatctgcagagcaatagacagagaggaaagtgactccaaaagtcacaaagcaaggtaatgcagagatgaagatggagtccaatgtttattataataaggtgggatccttactaccacacatctctgtcaaaatgcaaaacagattgaactgcatatcactgggcaacagcggagagcctgacggtaatgccagtcatatggctcccatattttataatgtccagaacagtttagaatctcacatcccaagtacactcatccttcagtggctcacagccttcctcatgccgctgccctctggacccacctgtttagcagcccatggcctgacgcccttgcttttcccactggactgaaatgaaactgctcagcagacagctgctcaccccagttccacctgctgggctgctcatcttttaaagtgatgagccttattcagagggaggaaggccagagaacaacataagcaataaggatgcctcatctggattataccacatcctgccaaaattctctcgtctgctccaacagtactgccaaaggggaccagacataacccaaccattaattcccaaagcactgtgcatcttgatgttccttaaactttaatcaccatgttctttacagtagcagagtgtccttcaacaggctctttgcatttctgaccatgtatcatgatgagacataggttcattcagagatgaaccaatggaacattgtatacaaaaaatgggggagaccctcagttaagagttcaatttactggagactaaaacttggatccatcacttttcaattatctgagactcagaggggtaaaatgacataatcaattttatgtcaatttccttacctataaattacaaataatgacatctactttccaaggttggaatctagattaaatgagataatttgggtaaagacacaaataataaattgattatgagaagtgctagttttattgcactggatctttgcccacatagcactgtctctggcctcgagttgtaaaaattatccaagcagtctcacttagggctgtacctgcagaggaaaaaattcagatttacctaaagagacatgccttctccatcagttctccttcaggaggaagataattttgtttaaaatttactacttacacattgatccccaaagtcattgcttcttttattgccttttaaataatatgactgatctaatgttgcttggaccatatggaaggggcaagaggtggactcttctagtcagagttgccaagaatgcctcataaagtcaatgactggaagctctcagtttctaaaacatgttcactctaaccatgtgtgggtgccccggatgtagccatgctaatgggacaaaaacactttggccttgcttgtttatgttcttcagctcaggtattaataacatcatttgcatctccctcactgtcccttaccatatagtgcttttgtttcgtgaggacgtgtgcagtcccaggtcctggggtcactgacttgggttcctttgtccacacacattgaaaaaaatatccgataaacaattacttgtaaaaatatacctcttagatagccagagatgctaagggcacagtttcccagtgccttccttgagctgtggttcaagaagagctgttccagagtacatgcaagatccagattccttacaaaatgccagggaagacaggaaaatagatcatgacaggcacacatgccatctgtcattacagcttagtcgctggggaacaatgctgtttgcagctattaaaaatgaaccagataatgtggagccctcagtgatttgctcctgaggaaatgtgtggtctgttccccaaagaatagagacttcttcagcagaaatgtctgtgcccagtgtcctacatgcagatggcttctgggctccagggatactcttaccaccaaaaaggccccatttctcctccctggggcctctcccagaagattcttcctactgtgcaaggtttttcattgcttactcccatttacaaagggttattgctgtcagtatcccaggaactggctgcaattagcagtctgtccaaccacagtgcatggggagagaaaggagatgctgtggtagcaaacagagagcaaacaggattgtttttcttgtcactattctgtctttcttggtttcggggtagactcacctgggaagcacataattgtctccataaacaacacatctggtccttggagtgccagaatggttttcttgcactgtccttccaaaatcttatggttcaattggagaattgctgggtttctttcattggcaaccaggacttgtcaagggaggaggtatcaaaggaagaagaagggagagatgggtctagagaaataaagttaatctttgtcaattatgaagctctgcttgacacatttgcatttcaacttgtcaatttcagagtctcctctgtgaggggaaatgcagatgctccccagatttctaatctatttataatagtaacaaggcaactctaggcagcgtgtgctcatcatgagctaatcatcctccgctatgccttgtgcctcctaattagtggcatgttggttgcctactgatcaagttggagcctcatccaggcaatatgcgtggggagggcaggtatggggagaaggaacactgaacccagtggagctcagatcttggcaggctttttaataacaggtgggcttcacaccttgtcttgaaatccatcctctttaaagaggcagccaccatgtccatgggtgctaacaggaatatggcaagtctccaaacacatgtctcctttgtgtctaggagctctccataaggagatgctgtccttccaaaacctcttggcttgatgatatagaccagtgggaggcacaagtagaagaaaaataaatatttaaatgtgcatctgtagctgataatggggcaaggcccctttcattgatttatccattctttccttaatagaatatttattgaacacctactttctaccaggctctgttctggatactagggatacatcagtggccgtgacacacttaaaatagggtggccacattggaatacatttggggatggatgagacactatcaataattactgtgggaaaagtagcatgaaacagggctgtctcaagcaaaccaggaaatgtggtcagtctgacttaaaatccagaggaaccatttatccaaagtcagagattgtgtccatgttccatttacccttgaattggcattttttccctttcaaatgctgacctatgagtgaaaattcaactctctaagccccaaaactatatttatggagatctcccatcagctttggtgtcttctgaggacctctcatgggggtggtgaaccccaacatactcagaggtcagtgagcacaaatcgagatggtttttgaaaaagtctttaaaatactgtatcaaatagcgttcttagttgcagaaaatagacactgatcctggctagttcaaacaaaaggaatttattacaaggctatcgggaactcacagaatcaggtttgaaacacttatcttggaaagagccagaagccaagatagctttggagggatgagaatcaggaagattaggaatatttttctagcagacagcatcttatcagacctttcctctgggatgaatgaactgcagtcgtctcttctacctttatgttactgaagattaaaaattccaggtaggttcccacaatccataaagtttagctcccatgctcactgcgtgtgcaatgaatgttacaggctgcattgtgttcctccaaaattcgtgtgtcagaacccttaactcccagggcctcagaatgggatagtatttggagaataggtctttaataaagtgattacgctaaaatgaggtcacatggacgggacctaatccaatgactggtgtctttataagaagaagaaactaggacacagacaggtacagaggaaggtcataaaaagatacagggagaagatggccatcttataagccaaggagtgaatttaaaacttctaacttccagaattgtgatgaaataaatttctgttatttaagccagcagtccccaacctttctggcaccaggggtggtttttttggaagacagtttttccacagacagggggcaggggtgggggagatggtctcggtattgaaagtgttccaccccagatcatgaggcattagttaaattctcataataagtgtgcaacctaaatcccttgcatgcgcagttcacattagggttcatactcttatgagactctaatgccactgctgacctgacaggaggtggagctcaggtggtaatgatcatttggctgcattagagtctcataggagtgtgaatcctattgtgaactgtgcatgctagggatctaggttcctaataggctagggactggtatgggtccgctgccccgggggtgggggatcgctggtctatagcactgttatgacagccctagcacactaaacagtgaagaaaaagattagggaagaaatccctaactattgttctggcttttgaagtagtagtagaagcatttggagttactgttcctcttatacaacatatgctataggaaaagttctctctcctattcccttctaaggaaataagtgaatggttatgaaggcagaatggatgctggacagagaatgaatgtccactacaataactcctcaagtgctttttaaaatcactgttctttgagtatttgttgagcataaactaagaaaccaagtggctggtactatgttaaatgttggaatttcagatatgaatacaaaacttcattcctggtctggtggaacttcttactatttaaggaacattcctgtaagttgttttcaatcttctatcacacactcttttgggagacaaagtgctttaataatttagggaaaggtaacaaagagaggaaaggaataattcttttattccccagaggaaaagttgtggtgaaagttaaggaagaattctcaaaggaaatttcatctacactagctatttttaaatgttgtaattttctcacacttttttattccatctagaatagtcctttcctcttctctcaggaaaaataatggaatgctgaaagttggagaagggacagaactggaggtttaatggggatgggggaacagtcagaaatgagctagaaagctgctagtctgcaatgacaaggtatttattttctatgtcatttcaagtttttaaaaataagcacatattcatttcatagttatttgttaaaaaagaaaagtcacatcagatgttcataatggttctccaggtcttgtggattttagggtattgccttagagtccttttaataaactttttaagaaacataatgagattgctctgcaatactgattattaagcatagttaacacaggcacatccataggtcaaagacagacaataatttcaagagaacttgtagtagtgtaatatctgctagaggatggtttattggtctttataagtggaaaaagaaactgtaatttgttcggtccttcacaataagtattaaagatacaggaaatcattactcaagattcttggccaagaaaatggctctaatgttgctctctgcttctcttttatctttctcctttcacaaaagcagagaaacttttttggtttagtaattttgctggcaatgtaccatccataagtatttgccattgttaacaaatgttggaacaaaacaacaccaattaaggttttaagtggttatcaaacaaggcaagaaattctgcataaactgcgaggtgaagaacttagcttggggaaagcatccctggtgctgagaaaatattttaaacagaagagaaattttccaataaaatttcttccttcgactttagtacctacttgacgctctggcacaaggtgatggctagggattcaggtttggaattctggaagcctcggacttggaggacatagaatggaaggtgagcaggctcaaactagccccatccactttggaaaatgatctactcttaaattttttccatttccaatatgtgctttttgtgagtgtttattgacatgtggtgtaacctttcttccttcagatgaattgtctccaactctgagctctcagaattaatgtcatcactccccacctcacactcatcaagggcttttcatctccctttggcgacaggagcatgatgtataataagaatttctcctttgaagggctagagatctgcgttcaattccagtttctgcatttattagctgtatggtcttgggtaagtctctgacctccccaagccttaattttctcttttgtccttgtgaagaaaataaaataataaatataaagctggccaggcatggtggttcatgcccttaatcccggcactttgggaggccaaggtgggaggatctcttgaggccaggagctcaagaccagcctggggaacatagcaagaccctatctctaaaaaaattttaaaattagccaggcatggtggtgagcacctgtagtcccagctactcctgaggctgaggtaggaagggtcacatgagcccaaaagatcaaggattcagtcagctgtgaccacaccactgcactccagcctgaatgacagagagagaccctgtctctaaaatacattaataaatataaataaaaatataaagcatttgaagtataacagattccacatcagtaagcatttcctccacccccaccctccttccatgcttttctaggcaagtctttgcttgggccgaagcaaagcaaggttcagaccccaaggcgtcctgtttgcccctcaagaggtctctactccaacccatccaacaacgcagtggtgcctcttcgccctcctataggaaacaatgaaacaaattttgaaaagatagtccctaaaccaaccccatcacccccactaatatttacacctgttcttttgtcaagtctcagagaagagccacaataccaataattttgtagaagcaaaattagagccgggacagtgtaggagacaagtggctggcccatgacgtggttggtgtgctgctggaggatgaatgccaaattgctaaatgcagccatccctgccaactgaacgtctccttttctttataacaaatatgacaccatgcaaggtcctccctctccaaaagcctatcattagctttgttattatggttattatcaacaatgtggcaatttccttgcatcttttaggatctttcaattattccatgcttctttctcttcccctttttttaagtctccctgacaccctcaaattcctccctctttctaccccaagtgccaccgtttcatttctttccccctcccaaattgttttctgcgtaaaaggatggcagtgacaggaattgaaactagcagaatctagaatctctctgattgaggggaaagaaatgtttgtatattattcaacattctccacattaatcatctgaagtttcatttttgactgaagtcttttctttatcttaaagtcactgacatagatatatatcatgaagttaaaaagattgaattacatcctgtcagctacctgctaaaatgcatggagcatcaaagccccagctcgtctctggatgtaccaactgtggtattttacctttgggtttttttttcttttcttttcttttcttttcttttcttttcttttcttttcttttcttttcttttctcagtgaacacacactaacagggtttgtctcttcattgtgatgtaggaatgattgaaaatattctctgtattgtttgataaaagacctttgccaaaaaagagaacagttgtcatgtgagcacatttcctagtggtgttgagatgtgcttgagtcaggtttaatgggatgtgtttgagcagcgatgttgcctgatgagcccagggcaggagcttctgtgtgaggtcatgggccccaatggactgtggaagctcccaagtttcagtgcagattagatacacagctggccttgtttcctgatagctgaggtacctgggctggggacatcctgggggttcatccacccaccgtgttgttactacctgagagtgaacagcaactaaaagcctgcattagtttcctacagtgctgtggcaaatgaccacaaactgagtaacttacaacagcagaaatttattttctcataattctagaggccagaagtccaaagtcagggagttggcagggttggttccatccagagtctctgaggggtaatctgtttcatttctctctcctggattctggtggctgctcgagcttctctgcattccttagcttgtaaatgcatcactccagtctccacctccatcttcacctcaccttctcagtgaattttcccttccttcttataaacatatgtgtcagtggatttagggtccatcccattaatccaagatgatctcatctcaagttccttaattatatatgcaaagatcctttttctttctcaaataagaagactgtcatattcatgttctgtatggtcatatcttgcgtagggtcaccatttaacccactacacagtcctatcccagaaaaaaagttaaagaaagatacaggcaaaaggataacagttgagataagcagcatatctgtgtggattccacagcggctctcccaatacttagctgttaacacgcaatgctaggctccatgctccatgtattttccttggctcctcctttcccaaggaaacttaccaggccagggtccagtcctgtgggttagagtgaatctgggctgtctgttacgggattgtttttgtggtctgtgttttgtaaattactattgttaggtaccttcacttatataagccctttaatcacaccagcctacggactgattattcataaatttcccactgatggccctgcccccacttccacctgaaggagaaaagagagtggtctgatttccagtttctaggacccaggtgaggctccctttgctagttataggatccaccctgctgccatgctgtggccatctctcaagaaagaagggagttttctttcatatgccctcttgcaggtttctgtgttttcataaaatagactgagccattagatcccatgattttcagtggtgcttacaggagaggagaggctggtgaagaggccttataaatatccaggctgggtcacatgcttcactcaggtttctcaaaacattctgcattagggttagtggtccaggtcttaggaacaggaatgcagcaatttgttttcctttgtctttcctcttgggactcttgggaacttcatggataggtgtgtttgagacaagagtggagcagttttgagtaccttggcctctcctaaaccatcttcattctctaaaaccctactgttgcttcataggaaatgcatattgaatttaaatggctttatttatgttcatctaatggaggaaagcaatttcatgcaactctccactgctcaggaccagttatgcgggagttaacaaaatgcgaaatgatagccaaatttaaaagctagagaagggtgtgtgttgggtagatgggaaaaaaaccatgtgggagacaagtgagaggagagacaggctgaagtggctgacagccctctccccatattcatgttctgtcatattcatgttctgtatggtcatatcttgcgtagggtcaccatttaacccactacacaggcctatcctcagcatgacacacagtttaccattgcttatcctactctagtctgtctccagaacggggcacatgctctgcctagatggaccctaggtcattctggtctctggactacctgagcctggaaatgtctcatctttctatccagctaaatctcaaccaccatagaatacacccagcatagatgtggttccccaccatgactttcttttgttgagttcagctcaattcttatcacctttatttacttcttccagtatttgtttgctatactacctgtatgcttgctatcaccatttaagctttctcatcttttatcatgtgagatacagagcaatatagcagaaaggacacagatcttgaagttggatatcctaagttctacttgcaactcttctcatataatctggcttacttaggccagtaatgcagtcaacctgggcacattttctttttgtaaaatagcagtcagtactgaaaagaatcgacatctgccctgcccaccttatcaggtcattatatgtatcaaatgagatacactattatgtaatgaatttaatatacaagcttaagctgccacaatgagttaaatatgaaggcaattccctgatttctctctttacttatagttacattcctttaatgacagtggcgcacccaacaccagcatctgtgagtgttgggtgctaatgtttcacagctcctgccccagaatagtccccatcgctcctgcaagtaaccccaactccttgacagggcaagtctgcagcataattcatgctccagagttccttgccaaacaagtcaaaactgaattcaacctgggactacatccttgttccgctctttttcccctccatccttctctctttcccttacaccactctcttaataagtgccctggccaggcgtggtggctcatgcctgtaatcccagcattttgggaggctgaggcgggtgggtcgcctggtgtcaggagttcgagaccagcctggccaacatggcaaagccccgtctctactaaaaatacaaaaattagctggcgtgatggtggatgcctgtaatcccagctactcgggaggctgaggcaggagaatcatcgcttgaacctgggaggtggaggttgcagtaaaccgagatcacaccattgcaccccagcctgggtgacaagaatgaaactccgtctcaaaataaaataacataaataaaataagtgccctacatgccccaaatcactgtgtcaggctgtgcttctaggaagcttgacataaggcaccatcctgcagtggtcagaccacaaaacaaggatccctccttcatccctgtgattcagagtgtctttacagactgaagagatataggacaatgtaagagatatagacagcttccccctcctcactgtaataatctgaagaaacaagaaaggcagctcccgcaaccacccacaaacacgaacagctgagtttcacagtgcgcatctccagcaacgagccagagcagaggactctgcaagcctagggataggcaggggttcttgcagctcatgagatacagagacatggatacccctgccaaggccagaacaccatggcatgccacagcaatgggcagctctcacccctccaggaattttcttccatggctgctgagctcccaaactcaacaatgatcgtcatccgcgcaagcttagctttcttgaaagtggttgtttagtgggaacatctggtgtgtgaatggaaggcctatttttttttctctttcttccctccagtcaacactaaagtgaatactttcgaaagctgtcctgcttccctcccagagatgggagagctgcttcattatttaactctgtgtttccatcacggcacaaactatttttgtgcagcccttggcagcctggaggggatataagccacagcttgtgagactttctggataattaaaagtttccaacatctttgtttaccaaagaaaacactgacatattaccttgttcagttacatataattatgaccagctcaccattttcaacaattgctgtaagtattgtagaccttcctttcttcctccctccctccctccctcctttctttctctttccctttctttctttcttcctttcctttctttctttctctttcttttttctttcctttcttcctctctttccttcctccctccctccttctttttctttctttctttttctctttctctccttccttccttccatccttccttccttctttttttctctccctttctctttctcactttctctctctttctccccttctttctttcttttctttcttctttctttctttctctctccttccttccttctttccttccttccttcccttcctctcttcctccctccttctttcttcattttttttgctgtaataggcctgaatattagttaatatttacacatacatatttttatttttatgtgtgatgagataaggacattgaatatctactcatgcattatcctttatttgattaaattccacattttctaggttgttctatgcaactgttctccccaaagagaacagctactctgagggtgatgagtgaaagtgtaacttacactgttgattatcttgctattgccaatgatatgagttagtttggataagaatatgtaagcatgatgtttcctgcatagtgtcataatgaagaccgtggaaatacaactggacctaatccattacctctggctggtgaccttggcaagttgacttaaccccagtaacctttaggttttttgtttgtttgtttgttttttaatcacaaaatgtaaataatgggccaggcacggtggctcacacctataatcccagcactttgggaggctgaagtaggagggtcgcttgagcccaggaggttgaggctgcaatgagccatgattgaaacactgcactccagcctgggccacagagtgagaccctgtctcaaaaaaaaaaaggaaataataatagtaggtactttatggtactatttaaggattatgtgagataattcttgcatcctacttagctcccatttaccaaatcctaatctaggtgcctcaagtctgtgcattattcttgcttattggttttgggcctcttaatagggaacaaaatatgtattttttaagaattagccatgccacctcaagatactcctcttgagaaaaccaagaaatagcattcagactgtggccttgtagcagagagaaaccaaccagactgtcaaatgggctagtagatctagatctatactgtctgaagtggcgaaccaatgattctaaacacagataagctgcagatactctgtggccagctatttgagactgagcttccttgatttgctgatagaaaatcaggctgcccttcaattattgcagaaatactctaccaccaaattgtgacgttaggtgctgtttctaattttccctttttccctttttcaaggacaccttacttagcaaacagattttttttttctattttccactcagagaactgaggacagggaagatagggccttattctctatgcatctggcatagagtaagtgtttagtaaatgcaaatgtaatgtctgggataaaatccacgtcaatgttaaggagggctcttttgttgtaataaactgaaaccttgagtaaattatctttatatttgacattgtcctttatatttgacattgtgcaactttccagttccaaagttccagttcttgtaaggctcagctgtagccttaaacactctgtatctctcaggaatcatgtggtcatctctctactctgattttttcttcctgcctatccatatgctctctatttttatttgcacttccagcccatgctggaaggagtcaagctaaaagtcccagagtgaagtttaagagagaggtaatctgattatttcagcttgtctttgtaagccagcaagtccctctccagattttgagatgaccatctgttgaatagttgtccatcctcagctcagctggctaagacctgggtagtagaacatcatggtacagagtttgaccacaccctctccatatgcatgcagatgaggccacccctcttggttgggatgggatggttactgccaagtaggcaatgtaatgtctttttcctcctcttccacaaacttgctgcatattttatgaattagaaatgagcagagaaaacattctctctcggagcttatgttcatggggtaagagcagggcactccctgagcatgaaatttagattcccctctgagcagaaagctagaaagaaattcagcatgtgggaaatgaaattagccatctgtagagaaacctatcctaaacgataagcagatgaacttccaggttcaatgatttgggagccatcagtctcaggggagcatggttgctcagcagagctaaagctgttgccttcttcatcctccatgtgaaaaaggaatatgctaacagaagggcatatcctgcatgaagaaaaaaaaaaaataagaatccacggggtgaggcctggaaaaggaagattcaacttttttaagaaaggggttcccagtcaacagacatgcactctctggtcctgtatccttgtaatctccaaaacatatcctatttacttctcacctttctgcatctgacttcattccccatcactcttggaaaatgctttgttcaagtttatcaaggattcatcccatcccagccaccgaaattcctggacaccttttaaacttcggttttaaaagattcacgtagcaaagtggaacactttcttctggaaatttattacacttttcttgttaaatttcttccttatacttcaaacgtgagtcatttaaatctcttccagggcttttttcctccatttttctcctccactaaccattggagtttctttctttctttctttctttctttctttctttctttctttctttctttctttctttctttcttctttctttctttcttcttttttttctttctttctttctttttctgttaagctcttttctcaatcctctgcttttatcactctctccaaagctagcttctctatcccaagactttatcctctgcttttctaacaatccctaaacttaaatacaaaatttagaagccaaggatgctaaaatctttctcctggtccacatatccagccctctctgcctctaccccgtgatgtgctggtaaatcttgtacaaccagctgtcatgggaagaggaaagaaaagccctagtttgaagtttgtcaattgccatggtgtaaaaatactgactatggctgatacatcaaccagcttacaaaattcctgaaaatttaacaactggctcttcatagctgctgtgagccagctgtggcacagtactacctctcctagaaatgtcctcttagctaacccacagatacctcaaactacatagtcaaggctggacttcaatgacgtgtgtctaccttcctcccagttaggaatctgaatcatagcactaacagcgtaatcaccattatagcagggaccttgctgatctcattcactatggttttttttttttttttttttttttggagacggagtctcactttgtcacccaggctggtgtgcagtggcgcaatctcggctcattgcaacctctacctcccgggttcaagcagttctcctgtctctgcctcccgagtagctgggactacaggcacctgccaccatacccggctaatctttgtatttttagtagagacagggtttcaccttattggtcaggctgatctccaactcctgtcctcaggtaatccacctgctttggcctcccaaagtgctgggattacacgcgtgagctacggcgcccagcctctcattcactatcttatccttagcacctataatgatgctggcacctagcacactataacactatacacatttatgcaatggatgagacattatgcccaatattccactattctaccttgttttctgagcatattttgtcttttaagtaataaattaaacttatttatcaggttcccatgcatttagcaaattcactcctgatgatggacaaaattgattttttttttctttttctttcttttcttttctttatttttttttttttttttttgaggcagggtctcactctgttgcccaggctggagtgcagtggtgcgatcttggctcactgcaacctccacctcccgggtacaagcgtttctcgtgcctcagcctctggagtagctgggacaacaggcttgtgccactatgcctggctgattttttttgtatttttatagacatgaggttttgtcatgttggccaggttggtctcaaactcctgacttcaagtgatccacctgcgtcggcctcccaaagtgctgggattacatgcatgagctaccatgcctggcccaacaaaatttatttctgaacctaaaaactgagaaccacaactgcaccgtaggaatttaccaagggcctatgcagccagacaactcctactattgtaatggccaataaaatgttccaaggataatagatgtgaacatgtttgctgaagtgctaaaatataggaaagcatcaccatattcaaaccactaaaagaggctgggtaatctactgaggtgcctgatagtgtggaaggtgcgtgggtttgagatatttctaaatttgtgttcaaattctagtttgggcagttatgaagcttgcagctttgggtgaattgtttaaccattgtttggttaaacttaacttgcattgtgaggaaaggaatgatgtatgaaaaacagctggtgcataataatggctccaaaagatagtttatattattaatgatggagagaaaagtaaattgtgttggtttctagtagatatagattttaatcttaattcctaccaaaagtccatgaatgacctgtacatagtaggtagttatatattgactactcattgaataaatgaatgcatgaataactggaaaataaagtactgagaagttaaataatctgtcctactcaagatgcaatgaaatacttttctggagaataaagattgttaggaagatgtcatgaggctaccacaaacgatgtcatatgaggacccttatatctgagttacctgttgatctggctgccagtgacagaaaagagactaaatcctctttgttccccaaactggcatagattctgttagtagagaaagtgttgaatcctctgcagctgacttttctctatgccagggccgaagcacactgcaggagtgatggaggccagtgtgcattgctgtgctttgggtgcctctatctggagtagacaaattctcttctgcattgcccgttcctacatttctgcccagccatctgatatggcttcatgagagctccaagctgggaagctggccctgcaaggcggaaacaccagatagaaagacctctaagtggaccctggaataaaaaattcaaatgatgtaattagaataatttttctcctgtcccagatgtgataaactcatcttgctaactgaggctggctagaaaattcctcaggggatttactttatcttttaaaccaaaggaatccttgagatttgactatagccaaccctattggccactactaacacactgaaaagcagcagttgataacagcagggatccagatataaagtcatctagaatctttaggaactgggtgttgaaccatagaaatccccctggctttgcagaacctggtgctagcaaactaattatggctgaacaacttatgacaaggtgggggaaggcagtcagccacagcaaaacagtcctttggaaggctggttttcttcaaatcttataagacagagaaggaaagtttctctttccctgcagcatgtcatagatacacgaacttggatcattctgtggcagaattctatttatttcagggtgttcttctggcttttgtgatattcctgacacatgagaaatcaagctgttgggccacagccaggccactctggctggaagatgtgctttgtgggccatataattgtttaaaacactttagggaggcatcattgaagtacaataagctgcacatatttaaagtgcacaatttgataggtttcaacatatgtatacacctgtgagaccatcattacaattaagataataagtattttcatcatgagtttt

SEQ ID NO: 5677 - DNA, 257093 bp, Homo sapiens
  SYT9 gene - 7229757 - 7446849 of chr11; NCBI Entrez Gene ID: 143425; Build 35; sequence includes 20,000 bases upstream of initiation codon and 20,000 bases downstream of termination codon of the gene
tcgggggaaatctgttaactaaaatgacctagtgttatttgtgaaagtcccacaaaggaagaggaaaagagtccacagcaagaggtaacatagaaccagaagcaaagaaaacctatcaggagcaggttacaggggtgaagcaggattcaggagaaactcataggaacgtaagccctccctggaaatctaaagtactacaccagtggtagaggtaggtgtgctccacacagtgtgcggtgtggctgcttgaaccatcttatttgcatattatgcaaaggataagacttgaaagagggggagtttggggagtactagattataaatgcttgaatatcaataatccccacagttgggatgactgttctaactggatgtggtgggcagcctctaagatggcacccaaagagccccacttccagatatccatgccttcgtgtaaacacttccccttggttatgggctagatttaatgattcaattttagcaaatagaatacagcagaggtgatgggatgtcacttccaagattagattacaaaaatactatggatgccatctctcttgacatctggggcattctcttacttgctcggacataggaaagccaggtgccatgttgcgagcttcccagtgtagaggcccacttgacttggaactggaaaaggtctccaatggcctgctagagaaggtctccatccaatagcctgctagagaagctctccagccaatggcccaattcaacagcctgtgaggaatggaaacatccaagcaatcacataaatgagcttggaagggaaattctcccctagacaagccttcagatgagaccacagccctggcttatagctcatctacaacttcctaagaaactttgaaccaaaagtacccagctaagccacacttggattcctgatctacagacactgtgagaaaataaatatttgttattttaagttgataagttttgggataatttcttatgcaacagtagataattgattcaatgggaaaaataatcaagtatatgttgcagataattgacaactttgggcaaagactatgtttgggattctaaatggaataaaacatttaatagagtcagagtgtaagaaatacaatgatatatgttcaaggatgcatcacagtataaagcaacatgccacaggatactatagcaaaacattcattttcatgatttcacttatttcttaaggtacatatgcaatatgtcttagaagagacaacacagaagctcagcagagcctcactagaaaactctgacttgccttccctcacttcccaatgacctaacatgaaaacgcaaaaagttacataggaatattggttaaaaagtctggtagatttcttttttttttttttttttttttaactcatttttatcaaaatttgtgcagttgtaaaaatttttttttttttattatactctaagttttagggtacatgtgcacattgtgcaggttagttacatatgtatacatgtgccatgctggtgcgctgcacccactaacgtgtcatctaacattaggtatatctcccaatgctatccctcccccgaccccaccacagtccccagagtgtgatattccccttcctgtgtccatgtgatctcattgttcaattcccacctatgcgtgagaatatgcggtgtttggttttttgttcttgcgatagtttactgagagtgatggtttccaatttcatccatgtccctacaaaggacatgaactcatcattttttatggctgcatagtattccatggtgtatatgtgccacattttcttaatccagtctatcattgttggacatttgggttggttccaagtctttgctattgtgaatagtgccgcaataaacatacgtgtgcatgtgtctttatagcagcatgatttatagtcctttgggtatatacccagtaatgggatggctgggtcaaatggtatttctagttctagatccctgaggaatcgccacactgacttccacaatggttgaactagtttacagtcccaccaacagtgtaaaagtgttcctatttctccacatcctctccagcacctgttgtttcctgactttttaatgattgccattctaactggtgtgagatgatatctcatagtggttttgatttgcatttctctgatggccagtgatgatgagcatttcttcatgtgttttttggctgcataaatgtcttctttgtcaccaccaggcctgccctaaaagagctcctgaaggtagatttcaagtaaaatcactaacaaaggatgctacgcggtccagggctttcacctaccagaggatacagaggagtcactctcccctccaaccacacaaaacagactacagaggtctttttatgtatgcttttaaggaattccattcctgggattcaacatagctgaggcatatatggacagatggtggagcattgtatccagagatatcaagatgagaggataaaagaagagaaatcgttgaagtttccttgctcttattagtacatttaaaaaaatcatagtccatgggctgttacaacaagttctcaatgttttccatttttatatttgccttgttataatccttaaaattaattaatcttaaaatacataattgccaaagttttgttctatttaaaactgtgattttatttaatattgacattacaagtccatttctggaatctgcctgccacagaggtttggtccatcagatagtgtggtttcacagttaatagagtctctaggcagactgcctgggtttgaaacctggctctcctaattattggctgtttcaccttgggtaagtgcttccatgcttcagtttccttactggtaagatggatgtagtaatagcacctaccttatagaattattttgaggaatcaatgagttattatttgtaaagtgcttagaacagcaacagctccacaaatggtctccttcccactaattctgtaataaaacagcaagtgctgggggaaggtgggggtgatggggggcaagaaaaggaacctgaagcttctccagtgcatagaagtttcttttgcctcaggagtcatcctgacccagaaacggtgttagtggtgtaacattgggctactttgtgttcgctggaaatcccagactaatattaatattcatgggatagtctctggaagcctagacttggacccacttataccttagtgcttaaattgtacagacactcagacaggtatgaattaaacttgggtggggggcagcttattcggccatcaatttttattttatagttctatgtgtgtgtgtgttttgaaaaacaaatggttcattttcttgctcctgtgggagcaaagcaagtcataaacttaaagcaagtgtctgcaaaaaactttccaggcaccagtctttctgacagacagaacatcatctattcagtagaaaaagtcaaacttgcttgctatcttttaatactcaaaaacaaaaacaaaaacaaaacccaacaacactgagactggtagcttttccatggttatctccatctaaaccttcatgaatagattccttcctccaggaataaggaatgaagacctaggactgacaagcaagaaacatgagctccatccatgtttgttctctggcgtaaactctgtaacttggaggaaggcttttggtttctgaggttgggctgggaattctgcagggcatagacaacttgctctcaatggagaaaacacacaagcacacactcagagagactcagacaacttgcatgcatacacacacaaaattctcacatgtagacacaccttcaagatacacatttacattaatgttcacaggtctaaggtgttaagactcagggaggatcatggaggggtgaggggcttagatcagttcagaagaggaaacttttcagatagatttctgtcaaagtaaaattgaggtgcagagccctcttcgagcccttcatcaagattcacaaaaataaggcattaggctagaaatagctctctgcaggcatttatatatacctttaaactccattgtttgaagcctatcaatttggagtgctgaattctactagattctaagatattagagtaagatagaaagatgaattttagtcaaccaatcaatgtgcactcaatggatgcctactacagtcacaggcagtgccctctgggccctgggatagagagatgattgagatattatccctacccgatgatagtctagtagggaagatgagactaatacatatgaaaccagctaatctaacttcaacgttagactattagagcccaaaaagtgtcctgccttgtcaaacatgctattttgccattgaaatactgctatccagacatagtaagtaaatttcttatggccacatgatcaaataatagaccagttcttctagagagaattactctctccatccctttgcattgttttataattttataaaaaacttttacatggctctgtgctttaactaggcatctgcctgtctgtccttccttcagggatgtgatgccccacaggtaagaacctgaccttatacatttaaggagcgcacagtgactgataaggccatatttagccaggaggtgctcaactcatcagccttaagtgatcggaaaggatcaaagacaacagtccagggaattcctcttggccaaggtcgccattcattacaccagatagcacaggtagtaaagacctaaatcttggatacaaattcgaggtaagatattttaaacttggcgtaaaattatagacctgtttctaagcccttctgtcttcttctccattttaaactcagttgctttataattttacataaaagggtaatgcattttcatttcagccagcaggaaaaggttaggctcctcaggtgcttttgaatcttcatgtttgcagacaaaatcattgaaaggttttgatatatttctcctaagggtttttcttgaaattacaccaggtcactcaatcatcagacaagcatttttaaaaacaaaacaaaacaaaactgctctttgtcaaatactgggcaagttgttgtctacaaacttgcttggctgaattactgagcaactactttatgcccagagaaaagaaaagagcagcatggttcttacatgtttgctaagctcttgacccatgctctcatgagtaccctatcccatctggatctgagtgttgcccttcactatccaccttctttcatttaacagttattcactggacacctcctatgtgtcaggcactgtcttagatgctggattcttggtgatgaacatggcagacaaggtccctagcctcagggagtgaacatactagttgtcagagggaatgggggatgggagtaagcaaaaacaaaaacaaaaacaaataaacaaaaaaaaccaataagcaaacagatactcagaaccctgaactgtttctgacatatagcaggtgttcaataaatatttgtgatttaatggaatgagcaagatagtttctgatagtgataagggatatgaaggatattgatgtgaaatagagcatttagacagggtcaacatggaaggctctgtgaaaaggtgatgtataggccaatatgcaaaggaaaggaaggagcctgcagaaaaggtgtccctaaagttgaggaagaagcaagtgaaacatcagggagttagtaacaaactgattgcatttgaggacagagagagaacaatgtgactgagacaaactgagcaagagggagagtagcacaaactgatgtcagaaaggtagagggagctcagctatgctggcactatggatcaaacaaaggagtttgggcttaatttccagtgttattggaagcatttggggttgaagcagtaagtcaatgtgattaaactcatgaattgaaagatcgccatggctgctctgaggggaaagaattggtaggaggcaatattggaagaaggaagtgcgtcagttaggatgttttagcacatcaacaggttataggtgtgaaagatattgttcccctctgcccttggtgtaaccaggagagaatgagtttggccaaagctgtggggcggttctggccataggaggattcatcctttaaccagagaatgctgaaaaattagcaccatcttccgtgtctgtcacaatgtaaaaaatattggaaagccctgcttcaatacatatttttcatgctttctggccatcgggcttctttaatacactctttctatgtttggagaaatttcccacttgaaaaccagcctccaagataactgctagtgatccccacgtcctagcatttgctcccttgagtggttccctcccacacagcaccagggttagtgtgtgtaaccaatagaacacagcagaagtgatggcatatcacttctaagattaggttataaaagacagtggcttatgtcttgagcttcctctcttgcttttttctttttttctctctctcatcactcactctggaatagtcagctatttcttaagaataccccagtatccttgtggagagggctgcatgatgagaaactgagacttccagccagtagccaagcagtaggcattattgaaagcagccccagtcaagacttcagatgatgcagctctggccagcaagttgactagaatctcatggcagaccctgaaccagaaccacccacctaaactgcttctggatttctgacacttagatattgtgaaatgataaatgtgtgctgttttaagttgttcattgtgggggtaatttgttacataataatagatgatgagtgcatcccctttgtgaaccctgctaccacactcagcctctcttgcagtcctgagctttgtcaacatgatcctcctgcctgagacttcaatttgggaaagaatgatatgaagaagccagtaatgcagagaacaaatgctggcgaaggtggtggagggagatttagctttcaaaggaggcagaggtaaagttgctagtggggaatcttgtgcccatctctgtccctgtggatggctgtgcctgcacccagaagtggtgggagtggtagagtcagcattggagctgtctgctgacagaacatggatattgtttctggctacctgacacccaagcctgatttactccaggatattctttcatacattttgtttaaactatctagtgagctctcttattggcaactaggaacccagactgacataaaaacctttgaaggcaagtaacagaaaacactgcctcaaagtagcttaaataatatggaatgaagtagctcccctaacaggaagtgcagaagaaggggactgcaggggtgaaccgccaagattctggctccactgttctagagcactcaagcctgggtctttccctgggtgtttcatcatcctttctggctggtggcagtttgactacagcagtctttttgtaacagtgaggcaccttattcagtagccctctatagactttccttcatgtctcattagccctaattatgtcagatgctccatcccaaacctaacactggaaagaagaatggttttaccacaactgccttggactaattagttttgacctccaggatccgggaaaaaagtcatactccctcaaagcacctggaagaaggtggctacattaaaaaatatagggcttttctgtagactaatagatactgagtaagcaaccaatacagtctgctttagacagttattacagggtccaggcagagggtgatggtggttcgtattagggtaatggagtaggggcggagagaaggacacacctaaaagcaacaagatttgctggtggattggattaggagggagaagggaaaaaacaagacagaaggaatgatgcattagtttagacctgagcaattaaatcaataatttacttagataagaaatgttgggtagaaacaggttgagatgaaggtgaagttacacatttgaatagttgcacatagacagattaatacatgaatttgaagctaagagggagatcatggctgattatatgaactggagagtcatcagcatatagaaggaatttaaaaccacggaactgagtgaaatccttacggacaagggtagcaagggaggaatgcaggtctgagaacaaagctctgtggcatgccgacagttagaggtcaggtagaagaggggaagccagtgaaagacaaagaaagagagtagtccgtgagaaaagaagaaaaccaaggcacatctcagaggtccaagtggtgagctgttgtccagcctcccgagtcccaattcctccctaccctcatctcaccccattccattcctggctgtctatatttgaaggtaatgaccagattccacattttaacttgcgtctgtgtttgaagtttcatatagcagattaagtgagtttcactgtcaattgagcctaaccaccgctagatactgaagaaaaatagggacagaattgaaacaaaaacaaaaacaaaaaactccaatcctttataaaacctgtctactgtttttttcttgaataatatatgcaagacattttcctcataaatgtcatagtaaatggctgaaaaccagcctccacaaacaagctttgaatacgtcttctagcattcctaaaattttaaaacatgaagtgaataccgtctcttactatttgattcaagtagtatccttaaagaaattcacaaataacattatattgctttaaacgaactactacttcaaataggacaaatgatatataatgagcttttttatatcttaaaaattaagatgtacttttgttttaatcaatggaggttaaagttatagtttaaaaggtatacctcttctaattaagatatacctcttcttctaattaaaccctccaagtcaggcagccatctacagtgcattaaagttcagattttgcataaaaactcattatctaaacttgatgggttttccttcctttcaatacaccacaccctcagaaggggtctaaaccaacaagaccctttaagaaatgcaaaataagacctcaccttggctcactgctgttcactgacaaacctgaggaattctaattctacttggaaagaaatagtcttctatggggaataaaacattttaaaagaaaaaaactatattttttgttatatccacatgcatcttgagacactgttttatattgcaacagatagagtccattacttcctctactggccaagcctagaaaaagagttactctattcccaacaagaaggaagaggtgttatttaaaacacacacacacacacacacacacacacacgcacacactcaccccccccacacacagcacatatcttagagatctatatgaaaaggagtgaaaaatgataacagagaaacttactgaggtactacccagatggaaggagagaaaaaatatttgtgtggtaataaacagcaattattttgcagttattgaatagaaagaaaatgtatgttcagttattagaaaatttccatgcaaaatatgaactttggtgagttgcagatagagaaattgaagtctctgtgttgaaggaaggtaactctaatgcacatggatatgagaagctgaagtgcagaagagaagtagctaaggaccaggaaaaagccagttggaaggattcagaccacagtggaattgccgattgattaattaggatcatggattgattgattagtcaagtgggactggattagaagaataacaacagcacagagtgttttgcttatagtctgtagtaaatcacctgggctttaatcaattctttagtaagctgtgtataattcatttcgatgtgtggatttggttttcctgcatttgtccagggggatcgtaagagtctgaaagactgtatatcaaatttgaaaaatcctgccagataattctaataggagactgatgaggagacatattgtatggtggttacatttcagtctctggagtctcccaaacatgggttcccatttctattccattggctactagctatgtgactttgggcaggtgaattagacttcagagtttcaatgtttccttctataaagtccagatgctaattacaataactatttcaaatgcttatggaaatgattaaattaaaaacacataaagcacagcacacagtatgtgatgcagagcaactgcttaataaatgtctgctgtaaatggatgcataggccagtctggaaagaccacatggggctctaatgtgcgttggtcagaccctgcccatcctcagaagtagaaaacaaaatgaaggcatagatctgactgcagagttggtgaaggcataaggccagtgctgcccttattggctatttgggactattcagcttcatgatgtgagctctgtgcttttccctggacccatctggggtggttaagagcagggctcaggagtcatactgcccatctctccagctgatcagctgtgtgaatttgggcaggatacctagtttctgtgcttacatttcttcagtagaaaagtggtgataattaagaacaccaccctctgcatagggttgttatagagattatatgagctaatatatttagggcatttttgttgtgtctggcacatagcatgagttcaaaaaacagtaaaaataattttaatataacactgataattttaactttgaaatagacctctaggattctaaattccactttgtttcccaataagagctttgcagaatgaatttatggagagaatgagaaagaataaagttaggagtaggtagattagaggtgggaaaaaaaggtcaagaaaatttgtaatggagataattgaaagtataaccaggctgggtgaggtggcttacacctgtaatcccagcactttggaggctaaggcgtgagaatcacctgaggtcaggagttcaagagcaccctgaccaacatggtgaaaccctgtctctgctaataatacaaaaattagctaggcatgatggtgggtgcctgtaatcccagctcctcggcaggctgaggcgggagaattgcttgaacccgggaggcggaggttgcagtgagctgagattgtaccattgcactccaacctgggtgatgagagtgaaattctgtctcaataaataaataaataaataaatataaagtattaccaatatgaacaggataacatttctgaaagaacatttctgaaaagtagagaacataaaatatatatagagaaaaaatatttgtgtgacaagacagcaataattttgcagttacaattaatgaatgaatgatataagcagagaaggaaagcttaaatatggaaattaagaaccaacatgaaagttgtatcaaatatctttgcatttattgttcactaaataaacttttaattaattgattggtttttgattaatgtgattaagcactaaactcggcagataacctgaagcctggttctttgcacagagtagggctgagacaaacgtatggtttttctatggtctctgaataaggccagaggcaatatagtggatctctccctctttctcccccttctgcctcctcctccccttcttacttccttcctctctttctgtgtacacagagatttttgtcaaagctttgttactaagtaaaggatcaagaaagggattactaaaactcttctttaagtgctcactacccatattctcacccataaaagtgcacatttacttccttttttcctaagcaggcagctgagtgtcagtcgacctgctccagattcattttcatcactggggatgggggaggtttgctgtgggcaatgaggaaaggggttggttcattggaattcttttttctggcatctttttggctagttggatagtctacaaccacttgtgacactctctaaccaattttggatttcatcatcctcttctctctttggagcatccagagtgactgcagcagttgcccagacctgcccaggatgagagtcgtcagccactttgaaagacagctctagggatgcagaaagcatttttttttttttaaattcatctgttggtggagggtactgaggtccaggtttttctcagtctcagttaagcagaaatctgacctctgctctcccttctggccttgttctgaaacgatgaacaaatgtaaaaccacgagaatctactaagagacggcagaggagtgccaggccctccgacctggaacatggccctctgttcctttcagtatatttcgtatatggtgtatctttttaaattctaaagccaacaaatctctattttctttaaagtgaaagaaatggacttacaactttataattgtccatcataaaactggaaagaaatccacacagtccaggagagaggaatacagattttgaacataccagaacaactgctactggaataatggtgcaacgataacacacacatgggcaaaatagagctgctcaattccaaatttgcttttatttcatctctcaagaaaattcactcgaaacaggaaagaataaagctcacagattaaaggctattgatgcccaagatgacagtgatagtcacagaacatgaactctaagtcagtgctagtctcttggtccagataaattatgtatacttcagggtctaaagcaaatgttagaatgaataccttttttggataattaggaagtttttgagcatttgatgggagtgctaatcactaggaggtagcatgggttcactgagaaccagtcatgctaatcaaatcttattttcttttgttaaaggcaactatctggcaagtaactgaataaaacaaaatgacaattaatagaaagttttgctgttaagaatcccacaccatttcccaaagtacggaatctagctcacaggaacaggggtaaggatgtggtctaagagcagcatgaaagatttatgggatttcatccatggcatgttgagatgctgtaacccaagcagcaactcagaagcctgaggcacagagagagcaggaagttgatgctaaagggtgaaggagtgctgggctcagctcaggaactctatttcagaaaggattttgaccaattgcagcacacgtagaagacagataagatgatgagagaacctgagcaatgtcacacaaaaagtggataaagataccggatatttgtgttctggacgtgacttggagcagcagtgtggcatggaaaacacaggctctggagccagacaaatttgaatttgaatgctggctgtctccaataagctggagaagttccatggagaagttactaaacttctctgttcttgtttcctcatctgtaaatgtaaaatggaaacataatgtgtgccttgctgggtggccaggattaaatgcaacaacatatatcaagtgcatgatggtatataacaaatgcttaataatgattagttataatcattaatgtatatcattcagggacattgtaggtgacttcaaagatctttttccaaaggcctttttcttttcttttctctcttttttttttgtttttgtttttgttttttgagtcagggttctattccgtcacccaccaaaggcttttttcgtcagcatataaactggaggttctcaaatttcattgttcagaagcattacccagtgtcttattctgtttgtactgctgtaacaggatacctgagattaggtaatttaaaaagaaaaaacatttattgtcttataattctggagtctgggaagtctaagatcaaggcactggcatctggcaagggccttcttactgtatcatcacatcgtagatggtggaagggcaaagagacaaaagggggccaaactcacccttttataacagcataattctacccatgcaagtggagccctcatggcctaatcatctcatcaacattctaccttttaatactgttaaaatggcaattaaatttcaacatgtatttttgtccaaccatagcatctgggatgctctttacgaaataattgtgtaggtctgagtgaatccgaggaaccagcattttcataagaaatccaggcaatttcagaaaagaaggcaagtgaaccttactttgggaaacattgataaaaacattctgaagtcgctcctatcttcaaacagcttttcttctatgcacttttttttttcagttaccatcttctctttgtccttctctcaaaagatttacttttacttctacttggtaggtctaaacagcaaaacttcctaaccagggcaccagggaagcttgatgtgccacagaatgggtaatacctgggctgagactttgattccttctgccacagtccctgctggccaccagtggcctagtcccttacccccatgtgctgtaaaaagttcactttctatctatgccacgacaagtacaagactgagaagcactgccttagagagcaaggatcattgtttatttctctatatattacccaggacctggaaggcttcctgagtcacaggggacttcctctgtcatgctttctgaatcatagaagaatacatatttgttcaatgaatgaaagaacaaatagttggggaaaggtaacatatttcagctaactctacttcttcaatttccatgtactttttaatcctgtgttcagctggttccaccctcaccactctactataattgcagaagaacagaggctttggagccacaaagatgtggattccagtcctgtttctatcatttaccagttttttgcctatttcagatgtctactgctgcattaaaaggttgctcccaaactctatgacttaaaacaaccaccattttattgctcatgattttgtgggtgagaaatttggtaaatggggatggttcacctctgcttcacttattgtctgctgtgctcatttgtgggctggaaggtccaagttcgagaggtccatggcctcactcacatgtgtgaggtcttgggctggctgttgactgaggcatctattttagtcttccagggctactgtaacaaaatagcatatactgggtggcttaaacaatagaaatttattttctcacagtcagaagtctgggaagtccaagctcaaggttgcagccaattccatttctagtgagggctttcttcctggcttgcagagagctgccttctcactgtgtcctcacatggcagagagaaagcaaactctttgatgactctttttaaaaattattttttatttctataggttattggggaacaggtggtgtttggttacatgattaaattctttagagatgatttgtgagatattggtgcatccatcacccaagcactatacgctgcaccctatttgaagtcttttatctcctgcccccttcccaccctttcccctgagtccccaaagtccattgtgtcattcttatgtctttgcatcctcacagcttagctctgcttgtgagtgagaacataagatgtttggttttccattcctgagttactccacttagaataatagcctccagtctcatccaggtcactatgaatgccgttaattcattcctttttatggctgagtagtattccatcatatatatatacatatatatatacacacacatatatatacacatatatacatatatacacacatatatacatatatatacacgtatacatgtatatacacatatatacacatatacatatatatgtgtatatatacgtatatatacatatatacgtgtatatatacgtgtatatatacgtgatatatatatatacatatgtatatatacgtatatatgtgtgtatatatatatatatatcacagtttctttatccactcattgattgatggacatttgggtcggttctgtgtttttgcaattgtgaattgtgctgctatatacatacatgtgcaagtatctttttcgtataatgacctcttttgctctgggtagatacccagtagtgggacagctgcatcaaatggtagttctacttttagttctttaaggcatctccacactgttttccatagtggttgtaccagtttacattcccatcagcaatgtagaattgttccttgttcactgcatccacaccaacatctactgttttttgattttttgattatggtcattcttgcaggagtaaggtggtatcgcattgtgcttttgatttcaatttccctgttcattagtatgttgaccattttttcatgtttgttggccatttgtatatcttcttttgagaattgtctatccatgtccttatcccactttttgatgggattgtttgtttttttcgtgttgatttgtttgagttcgttgtagattctggatattagtcctttgtcagatgtatagattgtgaagatttttctcccactctgtgagttgtctgtttactctgctgttttttttttcctgtgcaaaagctctttagtttaattaagtcccagaaatgtatctatctttgtttttattgcatttgtttttgggttcttggtcacgaaatccttgcctaagccaatgtctagaagagtttttacaatgttatcttccagaatttttatagtttcagctcttagatttaagtccttaatccatcttgagttgatttttgtataaggtgagagatgaggatccagtttcattctcctacatgtggctagccaattattgcagcaccatttgttgaaaagggtgtcctttccaaataaaatacttaggaatatacctaaacaaggaggtgaaagacctctacaaggaagactgcaaaacactgctgaaagagatcagagatgacacaaacaaatggaaacatgtcccatgctcacagatggatagaattaatattgtgaaaatgactatactgccaaaagcaatctacaaattcaacacaattcccatcaaaataccaccatcattcttcataaaattacaaaaaacaattctaaaattcatatggaaccaaaaaagagcccacatagccaaagcaagactaagcaaaaagagcaaatctggaggcatcacattacctgatttcaaactatactataagaccatagtcaccaaaacagcatggtagttgtataaaaataggtatacagaccaatggaacagaatagagaacccagaaataaacccaaatacttacagccagctggtttgatgattcttataaggaaactaatcctattggatcagggctctacctttatgacctcatttactcttaattaagtcctatctccaaatacagtgacatcgggaattagggcttcaacataagaatttacagttcactctatagcagtatctcacttcccttctgtatgatattctttctccacattgtttctcattcttctggacccctctccagcaagatatcctgtaaaagttgcaagatcttttcaagtctagactcagctcagaatttcacttctacacattctgttgaataaagtgagtcacaaggcaggcccaaattcaagcagaggggaacagacttgacttcttgatgggaagagtggtaaaatcacactccaaaaggacacatggaattggagggatagctatggctgtctttggaaacagtctaccaatttgtccttgaacaaattgtttaaccacctgattttactttctttgcctgtaaaataggaaatatagcatcaaccactttgggatgttgtaagtaatagattaagaaagtgtgtttagcacctcgtacattgtagtagaaacataacagaaacagcaaaaacacatattggttgagcccatactatgtggcagcactattacaagcacttaaatatattgctttatgtaatctttgtaacagcccaaagatacacgttatctttgagataagatgagaaaccctaggcacaaaaatgttaacttgcacaaggttggttgcatagtaactagtctgtctaaatcttgaatgtcttactgtctactttatccaaaggacactttttagttttttctctttaaactatatttgaaagtttacagttgatgttgctcgctcctctaccaaacactcctcctcccgtgatccctatgactcccctctgtacaatctttcctcctgttctcattgctaccttccaatctcctctttcatttcttcaactcttctttcttgaaggaaccatcccatgtggcaactcagtttctacctttccaatgatgattgccagtcttcactctctcctaaactctaggcttgcatttctaagtgttattagggtgtgagcacatatgacccaggtaacgttttgaaacgtttgtgcctttcacttctttcttattccattggttgcaatcttgtcacttaatacttgaaatgtttttcaaatttggatgtttctagcaatcagctaatgcctttggcctggtttaggccttcatcatctcttgcctggtttatcaaagtcattttttaactgaacttgttgctttcagttcctctctgacatgatggcattagggtaatatttccatgtgcttcaacacacataccttctcaccattactatatgtcccccccgccacccccccccagcatcacactatctctggtgtcaccttctctgttcatggcctttttcttcttctctaggggttcccccctttgaagaaacagcatctgctcaacctcccctacaggctcccttaaagctggtttctcctccctctgtttgtctctttgcaactctctggaggcatctttacctttacaactttgcattttctctgctattcccatgtaagttccctgaaaccctagtaccattcacagcaggatttcaaaggttgcctgttgcgtgagcattctataggatcccaaattatctttctgtgcaaatatgaattgttgtgatatgtccgtagagacggcacaacctcatggctaagaatgatagttaccagttctagagatcctactctaattgctctagagtgggggcctgaacaccagtattacaaaaaagacaaaagaaaaagaaggaaaaaagaaaaaagaaagagagaaaatcaaagctaccttcatcatgtatgaatttgagcaagtaacacctttgtgagtccccaggccccagtttctcattggtaaaatgaggataacaattacacagaccttgttgggctatgtacagaattaaatgagattatgtacctaaaaggcttgtggcacagtgacacacacacacacacacacacacacacacacacccagagtacttcgtggttatttctaggctttactgcttgaaaggctgaaaagatgggtggatgagaggtgccctgaggttccttccaactctccaagattctgtgatactcctccttgggtgctgaagacactttggcaatgtttggatttccaaacggttgcttagaaaactaagggacccacgaagcccaggtaagcctcagggtctttcccaggaatcgtttatttatttgatcttagttctgacctagagcctccaccttctccatccaaatcaccacagtggtcgaaaagggcctgtgcttgggaaatccttcctttgttggcgaatcttggacccaaaccctgcatttgggcatctgacacccataggcccatggttcaaacccaggcggctctttccaagttcgaagcagggactcggttctgcgcatctggcgggtgtgcccagattgtaaccttcgcactaggcatccaagaacgtgctttggacacactcggcggtgggagcgggtgcttggtttgcatcagggatgaggggtggagtagcgaaagcgcccggagcgcgcactcactcacactccccaagccagggcgcggccgctctgggcgcgaggtcccaagccaagtctcgcgctcggccaggagccggggagtaccccaggtccccggtctggggccgccgctatcctaccctgcggcgcgcactcctgacctggccccgccccccggcggccgcgagtagcgggcggagcgcaagcagagaggcgctctgggctgtgcggcaccgcctctcctcggtgtctggggagggacggagggaccgggcgggagagagagaaagcctgaccgaccggctggcgaagagctgcatgcaaccggtgggaggccgggccggctgggtctggggctcgggctcaggctcgcaccgtttctcggcaggtccctggcggtgagcgcggacggcccggaggcggcggctctgagctggcaggcggagggctgtctcctgcgcccgcctgcccggcgcggtccgaggatgcgggggggcgatgcccggggccagggacgcgctctgtcaccaggcgctgcagctgctggccgagctctgtgcccgtggggccctggagcacgacagctgccaggatttcatttaccacctgcgggaccgtgccagaccccggctccgcgacccaggtgagtgccgccaccgccgcctggagggacctaagggccctgggctgggacttggggccgcaccggggcctgaggcagaacagcgacgcggactgggagagggcggggggcggccaccgagccaggagagtgatcaagaaccagcgcactgtggcctgatgctgtaaccaggcggggacccgggcggtggctactgcacggaggccgactccgggtcggctagggcagggttggagggaccacgcccgccacctgcgctcccatcgccaaggctcctgggggcggctccctagctccgagctacgctctccacttcccgggctatctgcactcagagcgaggggaggccgcggcggcctcggagccgtgggaagggggacgaggccgaaggaaactctgggaagttgggagttggggacggccccgggttggggccgaatcccaccgggtgctgctcatcctttctcccaagcgtctagttcctttccttggtatggggtgagaagggcgggacgcgatccggcgttgggccggggacagggtgcttctggccttgggcagacgggcctgaacccgttcccggcgggtcgcacggcatggaggtggcctgggcctgggcgctaggctcgaccagcgactaccgccggccacgatggggttcgtagactcgtcggtcctggcttgtgcacctgtagttactcctagtgaaagttgcaaagctcttaactttggaaagttcatttattttggcatttgaccaattaaggttggaggagggagttttagtggagccatttgcttttcctgaggtccctgggtctcccaggtcgtctcatccgttactggctactggaaaatgcattccttccaatgtttgcttgagatgtttctcacctggagaaatagttttctcgaatattctcccaacctaagtacttaccaaaacagcatattgtggttggattgttaaaaatgggatgagaaaatggcctttctcttgatattgctatgtataaatattggaaatgagctattgccttgcaaattatgatgtacgaattgaaaacaatttattatataaaaatccatttatccaaaagataaattaaagaattatttgatttataaagagtgtcacactgagccagacttaaatagcatatccttgatatattcaagatggtcgtgtggggtgaagtcatctgctaaaattttaaagtttatatcagattttccctaccagaggcttttttttcctattgaaaaagaaaaaaatattgttttccattgccggtggttatattaactaagtttattgaatgatcattgatatattacttcaaagtggataattgggtagagaaatactgatcccagtggtttccagggaggtttaatgtccagcctatgtgcatctcattgctggatgtgatgtgctgaataaaccacagtcccttatctcacaagctggagtcccaggaagatgtcttaagtcggggaagttcgtccttaagcagcagaagcaagacaattattttgcatgctttgcccaaagcaagtattagtattgaaacatctcacttccttgcctgtgaccagaccacgagttctccttgttatcccacataagcagttgtctttggctttacaagagaagatggatgaggcctatctctgaatcacatctttttggccagttttctgcttctactccttttaatccgggagctggatcctgtgttctcagattctcttcagcccctacaccaggcaacccctgagaaagagtcactaagtaggcttcttacaagaggaaatctgattccttggcggaggaatagctagagataggagtcgaccttgctgctctgagttcctgatagcagtgctctgctttcttaaactaggacacaagggttttgaagtagccccatgcccctgtggctctttggtttttgttggaaagtagccagctcatgaggacaggggtgggggttttcgagtgcaaggtgagaggaaatgaggccaaagattacatccaaagtgcaccctctccttcaggacacttctcccttcatttccaaatctcccttcatttccctccttccttgccttgccgacattaattcttacatcagatgcatttgtcttcatccctctgaagcaagagtgtctttaatctcggaaccctaaaagctgagtagtagaaaagctgcaccacacaacgccgtgtgaataatgtccctgctgttgatagtgtgaaccagaacaaccatgcacagcagccctgagacatgggttcctagagagagtcatctcggtaaatggatgacttctttttctggaaaggaatccacctgaatgccatgtcccagctttctctgttattgtccattcacggccaccctgtgatagctaggttttctcaagctgaactaaggactttggttataaaaggagaaaaaagatataatttcctgtggacagcaaagtgaccctgcatctaggaaatttactcattttttcagaggtgtggaaagactagggcacagaccagcgggcctgagccatcagaaaggttcttttttgtccaggtagttatagtgccctgttgggggagtaccgcacccagatttccctgacttggtgttcacagaggacttgatgcaattgtggtttaaaaaaataagcctaagtcacagttggaactgaagtgcctcacccagtctgtcatctgtaccaacttgtggaaaggaaagtgctgagtgtgagcacttttgtccatagaaagcaattagaatgctctgttggttgcctttatggtgttttatatgttaatgatgtgggacataaacttgcaggcctcagagactagcctttaaggcagagggaacagcaagcgcaaaggccctgaagtggtagcattattgatatgattctagaaatggtgacttcagaggtggctggagaggtgtgaaacagatggagagtgataagacgtgtatggtcaagagttagagagggtggatcatgcagagtcttgtaaaccattataaagactttggtttttactctgaatgagataggaagccattagaaggtgctgagcagagaagtgacaacactttgactgctatgttgaagagcaaaggtgaagtcagagaaaccacttaggaagctatttcagaaatccagacagaggtgatagtgacttcaacagggatagtggtaatggaggtgatgagaagtaattggattatgaatgcaatttgcaggtacagccgcaagtatttattgaaggaagagatgtgaaaggtgagagaagggcaattaaggatgcttcaaaggctttttgacctaaaaaattccatgtacaagtagaagtcttcaggaagaaggtaggggtgaggagggaaatcatgaggtttattttttattttattttaactttttgtaacacattaagtgtgtgatgcctctttagatagccaagctgttttacagttgaacagtgacctgaggtatgactatcctctttaatgtcaattgctctatgctcgtattttttaactggagacttcgctgtcaagaagattaattggttatagaacagtatgtattgttagaaggttttccttgtagggaattaaaaggtctcttaaatttctacccatggatcttgattatactttttttggtcaaaaagcattagtcttatctctcttctccatcatacacctttggctattaggaggtaaactagcctaacttatctagatccactctttccaaggaacagaaaggaggattggatcatgtaatgactaggtcttaaacatgtttttatcattttctttttaagtcttttcttctgtagggtgccaaccatgtctgtgccaagcactttatgtaggtcatttcactagtcctcacaagtcttttaagcacttatctgtgttccagcagcagcagcagctgctgggagcttgttagaattggagatctcagttatgtcccagacccactgaatatgaatctgtatattaacaggatcctcaggtgagagttgtaggcacattaaagttcaagaaccatggctaaaagtgattgatatatatgagtaaactgaagtccagagaagtaaactagcccagggccatggagtccatttaaaagaagaattgggtctaagtgaaagtagcttcttaggtagtcacatcacatgtactgaaaactgaggagttattgtcaatgaaaattttctaggtgtttttcataagagccacccttagacctactttctctcttctgtacttgtatgatggatttaatccctaagtgtaggtcacattctatgtagttgtaaagattcagcttagtatttttgattatgaattctgttatccaggatactggttttccattcatgttccaactccatattctggagatttttctgcatgttctctgtgtctgtacccaatgtttagaaaaggttcagcaggtcagagtatgaagcagagccttaagactcatgattagtgattcttctctccatgtaaatattactctattcaagaaaagctttttctaggtcatggttttcaactttggctgcacattaggaatacttagggagctggaacaaacaaacaaagaaaaaacaaacaacagcaacaacaaaaactaccaatgactgggctgcaccctagaccagttttaaatcacagtctctgggaaatgggcctggtatcagtatttttaaagttcatctattgattctaatgtgcagccaagtagagaacaacctttgagaccattgggcaaagaatgcatccgcctaacccttctcagctcagctcacatttgtttcttgcaaaattaggaaagatagtatcaaaaactaggaaccttgactgttaccctgtacagctagtgcccatatcaactgattcttaactttcttttcccaacgttatcctacatttttcttttaagggctcattgaacatatcataaggctctattatgtccaccaatctgagaggggaaaaaacaaacaaatcaagaaaaatcttgtctaaatagtgtgtcattaaaaggtcagaatatagaaccttcacaaatgtcaccctatgttaaattataatgaagtcacttattagaaaatgtacatgtaaaataataattaaatatagtttctatgaaaaaaatctccaaaataatcatcaagattaaatattagccttgattcaaatttttctaaggtagtcaaaagagaatcagtcttgaaacactggatgtttatgaatagaccttggtgtgattatgcacaatgggattaatttttttaaattaatgttaattgcaatcaggaaaaagagtcttctaaggaatgagtggcatattggatgcacaatatgtgaagatctaatttgcatttacttcggtgacatttcagggctccttcataaatattttatttaaacaagtgtgttttcatctctgcgggactcctctacatggaccagtgagtggtttagtcatgaggtaattatcaagaggggaaaacaaaagcaaattgtagtaaaggcatcacaggcagccctatggccagctgcctctttcaaaataaacaatcaaaagcacaaactttttgatgtgggataaactctcaaggaaaaattaaactgacacctaaaggaaatcatcctcaaattttctattatgtatagagcatagatgttgctttcactgaagtagcattgaggcacttttatgtttgtgctgcaagtgcaatttcccatatggttggcttaaaaacattcataatctcttcctaacaggttgacttgagggaactaacaagttcacactccaaagtgtatagagaaagtggaggagcttagtgagaggcataaatgggggagcaatctcacttttaaaaggacaagtatggagtatgtatttctattttctgaatgaagtttgaataaaatcaccatttgtggagaagttttcagttttcactgcaatcttggagcaataaatgtgcatcacgacttccttttctttcaaatgtttatttggtgggctctaggaagggctttagaccacatcaaatcctgaggaccaggctttgcagatctctttgaaatcttcatatggccttgcacatgtattttatcacacaaaaactttaaatcaacattgatagaactgcacttgaaagaaaaaaaaatcttctaggacatcaagatgacaaagtggaataagcaaggactttggagttagaatctgactgcacttactaccttagtgaccttgagtaaaatatttaactcttcattttattcatctataaaatgggagtggaagattgctgtaacattgtgcccagagtaaatgctcaaataaatgatcaataaattgatgttgttggtagtatcacctgcccatgtttcctttcagccgtggtccacaaacatgtatatgttttaccatttgtaattatttgtaggctaaatttactttctacttttttgtaaacttagcattttattacctcttattagctgtgtgttcctggacaagttatttaacctctgtgtcctcattttctcatcagtaaaatgtattactagtatctgggttactagttacccagataaaatacaggctgccagttcaatttgaatttcagataaacgacagggaatattgcatggcacataattatacaaaacaatcatctgttgtttatctgaaattgaagtagaactgggcatcctatatttttatttgtgatgctgacaaccctatactagtacctatctcgcaatgcatgcgaaataccatagtacctggtatatgctcatagtaattacacgtagtaaatgctcaataaatactagccattatttctattattataattttcccattgttaacacttattagtacgtaattattattgttgtgatgactatgtatattccaagaatgggtataccttttttatttaaccattcttttgaggctattctagcttgtaatttttttttagtgtgaataatgtcttgtatttatagtcccctgtttccttttgggaaaattttttcatgataaattataaacagtgagccctaattgctttctggtagatctatgttagttagtcctgctacatgtcaacagtaaatccgctagcattaggtgtataatgtgaacaaaaggttgctaatttaacatggtttaaacagctgcttagttgtttcaatttgtgttttttttgttggtaagactgaatattttttgttttgaaccttcttatatttactcttaagtgaattttttgtgttctctaccacattctctatcatgtaccagtttattttttgagaatcttaatgtttttttctaccaatttccattaattagaatgtaaatattctgtcaaattagctcacagaaggaatattgtatagtgaatgagctcaggttgtctgactataatcaacccattatattaaagtgtcttttgaaatttcaggggtggttcaataaatagggattcgttgtaacactcttttccaatgcaaaatgctgcatttatttatatgaaatatgaaaaagttgttataatttgaatctctttttctttatgttttctttcccactccaacctaccccaccctacccttgtgcagctgttacttaaccacgttgaattgatcaatcttttctagttataattaagttaaattccaaaaacatttattgagggccccttaagtgctatgtacaaggttgggcatctgtcattcaaagatacattagacatgcttactgcctctatggaattgacataaaacaataatggcaattaataaaatcaagaagggagatatctactggatacagtacagaaaaaagaggagagaagtaattagctgacttgagtggatctgcagaggcttcctacagaagtctattcttgggcagaagagtttgtctggaactagttggtgggaagagcattctaggaatttacaaaggtcctaacacagaagaggatggatcctgggtaacagtaagttgagtgtgtgttggcaatgttgagagatggatctgctctagtaaacaatggtcaaatcagatcacgaaagcccctgtatgccattgccaaaaacccactgaggactaactggagcactctgacacagaaatcttgaaagaagtacaatttatatcataagcccaaagcaaagcacaccaggagatttcagttccatgaatgcagcttctgaagtcttcctggttccttatggaaaatatactcaggttactggcaaatatgttctttctgtccaaggtaaggtcctaacagattggaatcaatgaatggaagtttacccattttagatccccaacatatcaccctgaaacccaactgtaattaccttgaatagttgtaaatactgcctttagcaagtttagtcatctggttcaaacatctggattccagatataattcctgactatgccaacagtgacatcttgcttccttgcctggttatttagtaatgaaaaagcagtgtgttcagctgcattgtaactatccagtctgtggatgtgcacagtctgttttctctgaagttatagggcccaagagggaatacgcatggcaggcctgcctagtgcccaccaagccacgctgtagagatagttctttattgtgtgtacagggtctgccaattaacaggcataattttaaaaaataattgaattgaatgcccttaagtgggtcacaggctgtccatttctaatatctgcctcctcgtccccaccacatacatgtacactttgcttatcacatttttgggacatgcctgcctattgaagacatcttagtttgtatcagctgtagcactgcagaaccattaaaagagtttacgctgaaaattcaggtgagttttatcccttaattaggtattctggagacaggataaacattgattggagaggttatagtaggggatgccagttatttgctcaccatatatttattgagcatctactaagtaccaggctctatcctaggtatgtacaaatgtagatacctagacacagtattgtacatacagtagggaatgaaacagaaaattaaaagtttgccctcatgaaacttacattttgggaaaatgataataggtacataaattatattgtatgttagatagtagtaagtgctaagggaaaaaacaaggcatggaaagagatcaagacataaagactaaactggcaccactgagaagttgacaaatgagtaaaggtcagaaggaaatgtgggagcaagatacacacgtagcagggggaagagcgttccaggcaggagagcggcgggtacaaaggtctcaaggcaggagcatgcttgacgtgttcagatattagccaagggttagtatgactgtagtgaggttggcaaaaagagagtagtagtagatgaggtcagagaggtgatggcagactgattgtaggcctctataagccattttaaaaaagtgacttttacttgcagtaagataggaagccattagcaagttttaacagaagagagataacatctgacttaggaagagaaaggatcactctgaccagcacatagaaaacagactataggaggggaaggttgaagttagggagaggagttataaagctgttgtaatcatgtaggtgaaagatggtggtggcttggaccagagtgatagcagtggagatagtaggaggtggtcagattctgggtagctggaaggtggagatgacaacatttactaatagatggatattgagtgtgaaagacagagaggagtcaagactaagactgtggcctgagcagctaggagaatagagttgtaggagaagtaattttgaggggaatgaccagcagctcagttcttgatgtgggatattggaaatgcttattagtgagcccagtggggatacagactagccgtctggatatatgagcctggagtttgggaaagatggctaggctgaaggtataaacatgggagtcatcagcatgtatgtgatatgggtctggctgaaattatctaggaaggcacagtgaatgggagagtgaaggggacccgcactaagttctggaactgtccaacggtaagaggctagagagaacttgaggaactacaaaggaagattaatgaagagagactagaaatgaaagagaaaatccaagcaagagtgttgacctggaacccaggatgaagaagaaggtgatcaaataagaaggaataagcagctgtgtcaagtgctactgttaggtcaagcagaatgaagactgggcactcaccattgcaggtagtgatgcaggggtcattggaagtaatgttgacaagcatttttgatagagaggtgggaacaagagcctgattggcatggctgtaaaagagattgaagggagaggaattggggcagtaaagacagaatagtcttttaagtttttctgctgacaagagcaaataaatggcatagtagttgctagtgagggaagtgagatcaagggttgtatttatttatttattcgtaagttaggagacttaacagcaccaaggtgaagggaatgactagtacagaacaaaaaatcatgatataggataaagaggggaggattgctagaatgatatccttggttgagaagttgggtacatttcccgaaagttcagtgtaggcatttaggcaccaaaggcacatagatgatatttaaaaccaaaaaatctagatgagcttactgtcttagtccatttgcactgccctagcaaaactaccataagctgggtagcttatgaacaacagacatttatttctcacagttctggaggctagaaagtccaagagcaaggagctggcagatgctgtgtcaggtgagggcgtgttcctcatagacagcaccttctctctgtgtcctcacatggtggaaggggtttctttcataagggcattaatcccattcatgggggctctgctctcatagtctagtcacttccccaaaggccccaactcttagcattatcatactagggattaggtttcaacatacaaatttggggaggacacaaacattcagatcttcacacttaccaaggggtgaataaaaatagaaaagaagtcaaacaactggttagaagtcagagaaatgtgcaggaaccaataaggagactgagagggaccagaaagtaacgtggagaaaaatcaagaacatgatggcttggaaattaagaaagtattcctaggtggaaggaaggatcccctgagttaaatgcccctgataggtcaagtaagatgacaaccaagaactgaccattgcatttaataacatgaaggctaattggtgaccttgaactgaatgattttgggagtggtgcctcagtggaactggtgaaagtctaactagagtctttctaaaagagaatgagaggagagaaattgagagaaaagagtataagccattttttggaattattttgtgaagggagaggagaggagaaactgattcaaaggatggcttttaaaggaaagacaaaataactgtatgtttgtatgctggagagagggaaaaatgatgtagaggattaaactgctggagtgatgtgctgagtaggttgagtaggtgggtttttcaacaacagtttgtttattgtcatgaagtcagggcagaatatatgggcacaggtgggcagatgtggtttgggaatcttgcagaagtttgccttctgattgctcttgtattcttggtgaaataggaagcagcaaggttataagctgagagtgaggatggttaggaagtaatggcaatttgaaaataagagagttataaatgtttaggagagtggaagagcaaatggattagggaaggaagtgtaattgccaggcaatactaagcacctgcttgaagttggcgatcatgaatttaaagtaatttccatcagcataggtgtgtgtgtttcttccatgttcagctcttttttttgcaggcatggaagagagggaagtttgtgtttaagccggggttgtgtgtatgagaacaaggaaagagtagcaaaagagttgagggtatgtagaatagattggaatgattgattctgaaatttcattggagtaaggagagaaaagcggatatgtaaaaggattagggatagtgaagacgtggtaggattaatggattgtaggtcctggaggggtggaatgcttgttgagaatgcagtgaggagaagggggccagagaatgagatgtttgaaatcaagattctggaggagctgcaactgttgacatgaccacgtccaggacatgatcatgagaggcatgatggggagagggggacaaatgattgaagacaggagctcaaagaactacaggcccagggttttggaagtgttatcgacatggatattggctttgctgagaattatgacaaaagtagttttggagagagtgacagtaagcgagcaactgggctctcccaggaatgtgggggaagcgacctgaggaatgatagatgtctgcaacaaggatgggcagttgtggtgtagtggtgtgttcagacaatatgagatttaaagctgggtgttttttaaagaaaacagcagcaggcagtaaactattaatttttacttaagcagaagtgttgaaggaatattttaagtcagtagagatgccttaagagatatttaagagataaaataattagtacaatgatatgaaatagagagagatcctgattcccaattttttttgcatatgtgcctggaaagatgtgcttataacttattaggtttaccacaggaagtcaagcacattttgtgggaaaataatgagattgattttaaacacattaagtttgggatgtgtatgacatctcatgcagatgtccagggcagttgactggtggaaaactgggaagaagttactggaaataaggagggtgaaaagcgattgaatgtcaaggccccttgcaactcaaagatttttgtaaagtggttcccagttccaggtatgcatcaaaatcagttaaggaacttttgaagacacaactgccctgtcccaagattgactaagtcagccttcaggggtgacacctaaaatacctctacacagctagggttgcaaatgacatgcacttacggccttcgtggtttacaattactttttacagccccttggtcaaaataaatgctcaaactgtctatgtaaaacttttataaaatattaggcaaggaaacccaaactcgaaaatgtgtttactatctatcatggattctttttttttttttttgtagccacagtgaattatctcaaattatttgtaagtacagctactattggcacaattactaataaattctgtagaaaatttagctgtaggatgtaactgtagtgtcctagccctaagtaaaatcatggtcttctttatcgctaggcaagtaatatgattatcatttgttcttattttaggataaccatacggtacataaaccctgtgaaaactctaactaggccatgaggttagagaataacatggttgcttgattcctgtaggctataaatcatcctagccaatatgctcacttcttgtcagaaaaacctgtgaaacagagaaagaagctggacaagaatgaggaggccacattagaatcacttttaacttgggattcagaggatcccaagttaaacatatttccattcttatttttttagataatatggatgtcaattgttggcatagctgagctagctctgaaggcttcccaaattatttcagagggaatgagaaaacagtgctgcttgctcttctttaatctgttccaccgtgactgctactttagatttaatataactgtaatatcccgaatttataggtcatccttcttctggggcttttaaagtactttgtgtgtattactttaattttgagggaactcagattcatcatcttatggaatctatttcagagggaatctacaaagagaactagaaagtcccccaaagtgtttcttttttttcttccagatgcctttggtaggaacattcattgattctaactccacactgctttagaggccatttatgtgtggattactgtaggctgctctgggggaaaatctaatccccacaggttcagttagagaggatccactctgcacgctgataaagattaaaactgcagctcttttcgattgcattgtcttctttttttatcttttaatttttgtattatcttatgcttcagtaattcaatcacatctgccttcccagtgcctcagtatgtggaaactgggaagttaaattgggcagagtaacaaaacaggagctctacttcatatgcctttgttgtaaaatgtgatgtcttagggtttgcagtggtgtcccatagtgctacagacaatcatcagatttgacccagggaaactcctggagaaaagtgagtagtaaatagtggccttaatgatgcaatcagaacatgggggattgtcagaagaggatcagagttagctttgtagtacttgattccttaaatgtttaggaagtagtttcattaaatatagtaaaacatttgtctactgatttatatagtttttaatcttctctttttccaaaacctcatgctaattaaattaacattcctataaaaaacatactgaatacaatatatatcattaagtgagacttattttaggttcataaatagtacaataaactgtaaagacttagaagtcataaacttttacttttcattaatgaagcaatatgtgaatatataaaaccaagtttgttataactttataaattagaaaaattagaattatgttggagactacaatacttcactgatagaatacatcaactagactaaatacatagaggatagaagttatagagttaaaataataaagaaaaatcatgttcacgaaacatttaaaaaattaatcagcacatgattaattttttagacatgacaataaaaaggaaaagttaaatccaacaggtaaaaatcgcatgggccacatttactgaccataaaataatcagtgagagattaagaagtaacaataacaatgccaaaactctaaacacttaaaaattgaactctttcagagatctcttgagttaaaaaaaatcagaaatggacactgaaattatagacattgagaatacaatggagtataaccaaagctatatctagatgacaatttctaattctcagttgttaatagcaaataaatacagcaatagaaaaaaaaatgcattgaagttaagagcctaaaaatagaaaggtaaagcaaatcaaaagagaaaaaaaaataagagcaaagcatcaataaaaccaaaagaagaaattactgaattagaaagtgaaaaatcccaaagaagcagtgttaataaataaaacccaggtgtgtctttctgaaataaaaaataaataaatattgtgctattctgatcaaggaaaaaatgagaaaacacaaatataaagcaaaaagaataagaaagaggatttaataacagatacagaagacaatagaaagcacaagaaaatggcatacatgccaatgatgtagaaatacaaattgagtggaagtcataaacatctcagagtgagtataaaaatatttagaagaaattgaaaggtagtcaaagaactttctgtgtaaaaaggtataggcctaaatatttttataggttaagtttaacaaaatattaagtactacatcagccctcttatttgtcggaaccacaaatagtcattacaaatttgttttaagttgtcattgcaacaaaagttttcagtgagcacaagaattaaaggtcatcagcacttccattaacaattactgttaatacttttaccagaagtggaattgctaggcttatgcacgttaaatattttgatataaaattatcaaattgtcctctagaaaggtttaacaattcatatactgtaaaaactatactgtggcatagaaaaaatatggaaggcatcctaatttactttgtgaggctagtatcacactaatatcaaatctgacaaagacaatagtaaaaaaatcttgataccaatctcagttaagcatataaatatattgtaaataatagaaaacaaatacagctttgtattaaaaatactgatgtactgtaacctggtaggggtttaagactacaggaatggtaaagcactaggaagcctagtattacagtaataggttttttggttgttgttttatatatataattattttaacttttgacgatgtatgcaacataagtcacaaacttgacacatttttctctatctccagtcattctctggttttaaaaatataactttatcgagacgtgttttacatattgtagagttcactctgaaagtgtacaatggaattattttttagtaaatgtatgaagttgtgcaagcatcactataaatcagttttagaaccttttcaacattccaggaagtttcctcatatccattctctgttaatccctgcctcaggagactactaatctactttctgtctctattaatgtgtctgttctagacatttcatataaatggaatcatacaatatgtgatgtcttctgtgactgggttccttcacttagcataatgtttttgaggcctggctatatcatagcacgtgtcattagttctttcctttttattactgattagtattccattagatggatgtatttcattttatttattcatttaccagctgatggacatttggcttttttccaattttgtgctattgtgacatggcaatatagtatctggtaaagacagcatttcaaatcagttgggggggtgggaaatgggctattcagcaaatggggttgagataattgagtaactatttgggaaaaaacattatatgcctgctcctgaaatttttcatgtggtttaaattttacaaatataactgctaaaattccaaaggaaattatgtgataatcattttatcatcagaatactgtatagatgacagcaaaacaataacagcaggttagacacagaggtaaatttttaaaattctttcatgtaaagagacctaggagtagtctgcccaggtctgagagtctctaggtagtcttaagattcaggttctttctgtctttctatgtttgccttctttagtgcattacttcaaattcaaagtcacatcatgggctaatatggctgctggaattccagcacttacatttacatccctgagagagacaaaaacctcactttcgacctgagtctactcttctagagtaacctttctcgaagtcccactctatacttgtgctttcatctcattgatcagaatttagtcatattgccatccctagctacaagaaggttgagaaatgtagtcttttagcttgataaattgtcacttcaaatgcaatttaagttgttattttggaaaaggggaaaaacagatatggggtggcaactaccagtgtctgtgatctttgtagtaggtgaagccttccttagcgtgaccctaaagccaaaaaccataaaagacaaggttgacagattctgagaagcacaacagcaggaacatttttattttgcaaagttcattatcagcaagacaaaccaaaaatgggacaaaataataacaatgaatgatagagaattaacattcttaaagtgtactgctgaaatacattaattagtaagacatttgactgtctgtgccttttggagagagtgtatcaattctttggtaactccttaaatgtacaataataccatattgacaatgtttattcttattatataaatatatattttaaaccatgttgaccttttagcaagaaggtacatttttttgtatggggcattattattttaattctctcccctcaagggcacattttaggctcatctgttaaatgcagctcataaacgctgttataggctgtttgatttaggacagattcagctagattacctgaatactcaattaactgccacagtgagaatcgtttgctttcagatcgataagaagatcaaatcagtagccattctcagttcagtgcttcatcaggaagtgaattaaagcaaacccattagtggtcatttttctaaatgctaatcagtgaatttcaaattctagaaaaaaaattgcatgtttttagtggttattatagatgagtatcttgaactgagttcaggacttcaggacattgaaagggggcctggtttctagccatattacttagacaacaataattcttcacagctttctgttaatatcttctgatttaacaggcaagttggagccaagtggcctttggctatttggtatccttggtaaccactgttagatgatgaattgaattagttaaaattaatttcttgtgaaaagctgcttccatgagaggatactgactttgatgtttagatgcacaagacacagacacacacacacacacacacacacacacacacacacacacataatgtggagagagtgtcatcaggtgtggagagtttttgcaggtaactgcaaagcctaataaatgtaaaagtgagaaagacgaaggaagactgcaaagggctctgcctctaagaactgtgcttctgcttggagagggaagacttatataaataaaggaatctgaagcataatagtcactattatttggctggtgaagtagcctttcttttctcacatctgcgaatgttaactgtcatgacaaagctattttattgttatagaagtttgggaaaagatggagaacacattttttcaatataaaataatataatatatattttggctccaagcccacttttgatgtcaatttaggtagcatttttctttcatcctgataggtgcctaacctgaggaccatatctgctacaaactctgcactcccagaagttaacatttttagggttattgctagaacatgcacagcccagtgctggactgtgtacaatggattgctatttgcttcaaaagcaacactcctatatcctgttgggtctgtagcaagagcaatccattgtaccaagatgtgtcccaggtccctggcccaggcccgccagtcatgcatttccctggaggggcaagggagaaatggatgcccctgatttcagtcctacatagaattttaactactgctgacttcagaatattctgcttgtttttttgttttgttttgttttgttttttgagatggagtcttgctctgtcacccaggttggagtgcagtggcactatctccgctcactgcaagctccacctcctgggttcatgccattctcctgcctcagcctcccaagtagctgggactacaggcacgtgccaccatacctgactaattttttgtatttttagtagaggtggggtttcgccgtgttagccaggagggtctcaatctcctgacctcatgatctgcccgcctcggcctcccaaagtgctgggattataggcatgagccaccgcacctggcctgtgcttggtcttggatgaactataaggtatagatatttagagaaaaaatgcagaagctgagctgtaagaaggtaaatcagagcttcatgtataaattggactcttagagtcttttaccattgaatctgcttttgttctacatttaaatacttcctaaataaacaagagcagcacatatcctgggcagtccatgtaaactgaattcaaagactgcctcaccacttaatagttgtataatctggggagaattacctaacttcttggtgtcttaattttcttatctgcaaaatgaggataataatgcttataggggaactgagggcgtgagtaaggtcatgactttgggacacagcatgccgtttagagatcaattagtgttagttctattattaatcccctcagtggaagcctttttaatgtttcacaaaaatcggcataactgacttctgtcccattctttatttttgctttcttttacttcctccattaatctcttttcttttcctccacccaccttctagtgcccttatccattattgttttctctcctcttttttcatcttatcccctcttacttcattttatcctccagactttttattggtgtttttttttccttctgcataccttaagtgacaatgtaatgcaatctagctattcactcatcacgtttaacaggaacttaccatggactggtcactgtccttggtgctggggttgtgaaaaagaaagacatgatccttgtcctcaaggagattaccttttcgtggaggatacagacaagtaaacaggcaattgaaactcagtgcaataagggaaagtgtggtttgatctgggagcacataggaggggcacctatcccaaacttggaggaagtggtgtcaagaaaggcttctccagagaagaaataaataagctctgaagtgtcatgggaatgagtgttccagtaaagcatttggaggaagagtttctagtaaacaacatgtgcaaaggtttaaatgcttgaagtggcatgtgaccttagggaccctcaatgagttaggattggtggagttgaatttggaagttagagtggggggttgttgatgtaatgacagttaaagtcagagaggtaaataagggtcttgtgggtcatgttaagaatttacattttatcctaatcttaatagttatctatcttatgatagaatctatagaacatgaaatgcagtaggagagtggtataaaggaaatctaaggtttctgatttaggcagctgggtcatataaaatgcagaagtaagagcaggtagagggaatgagaaagagagactgaattgggttttagaaatgtgtatttaaggtatgtagtacctgtagttgtaaatatgggcctgaaatgaaaaaaagagtttcaaatcttattttgaaatttgatagtgattgcattcattattctatactgaggtttttttcttttgttagtgtttttgttttttgtttgtttgttttttgactggttcttctgaatgtccttacattttgatgggcatagttaaggaattatggcccaactatatgtagccaagagagcaaagtttaagaagaacatagttaaagtgcgagagagaacccagtatttatttcttctgaaggcaattaggaaaaaatcaggagtgtttaccctctgatatcacaagagttgcttaaaagaacttgaagattgctgctaagtgagtcccatggccaggacatggcctaatggtagtctgagggaagtgtatgaatgaggttttggggtgagtgataagtaagagcttgtcctacataaactcaatctccagtattagagaggtctccaaagcacctaatttcattgaataaaataaaattattactggatttattttaaaatctttggagtttacagcaaactaacacaggaacagaaaaccaaacactgcatgttctcactcataagtgggagttgaacaatgagaacacatggacacagggaggggagcatcacacaccagggcctgtcagggggtgggggacaaggggagggagagcattaggacaaatacctaatgtatgtagggcttaaaacctagatgacaggttgataggtgcagcaaaccaccatggcacatgtatacctatgtaacaaatctgcacgttctgcacatgtatcccagaacttaaagtaaaacaaacaaaaaatgtttagagtttatatttatttctggcttgtatgctgtttgagataaagtcttgtgacaagtttattacctgctgtgctatgtagaactgcctttgattagtcagagcctgacttttcttttccttccagtggagccccctcattaaggcatttcaagcttagttgactaaattcatgtttctgtaatacacatcagtcatgattctacactctttccttatatctgtgtgaagttcatcttttttttttttttttttttgacagagtcttactctgttgcctaggctgcagtgcagtggcacgatcttggctcactgcaacctctgcctccgggttcaagcgattctcctgcctcagcctcccgagtagctgggattacaggtgtgcaccaccatgcccagctaattttttgtattttcagtagagatggggtttcgccatgttggccaggctggtctcaaactcctgacctcacgtgatccacccacctcagcctcaggaagtgttgggattataggcatgagccactgtgcctggccaagttcatgttttaatgatgttagtttatttagttagtttcttcctatacagctgggcccttctcttcatcactatgcaggtcttccttttcttcacttctcacccaacctgatgcatagaaatggacctcagcttgaacttttggaactgatgctgtatagtatagatggaagaatgaggagttttcccttacaggatgcagcagccacacataaggccatctgctcagaaaacctagcagtgggtccccaacctcttcctcatggccacgttcctcagtcaacaagcattatttgaagttttggttacaatgttttccatcacacctgattcttcacacagattttgggagagcttcctggaagccacaacccactggagtgaggaatgctaggtgatctagtatctccatcctggccttgtaaagtttgggttgttggttggaattagttcttgcacaccaagactgcacagagccagctagcagagtgtgcagggcctctgagccagttctgggtgtgctccttgtccaccagccctgctccagcagattctccctgactagccagctatgaactttgccagtgtagttattctctctactacctctcccctctccaaatggtgtcttcctcttcacagccacactgctcataaaatagatttcctcccccaccttctccaaaccaccttagtccaattcccacacccaccacttctctgaggctgctgtaactacagccatcaatgacctgctaattgctaatcccagtggacacatttcagtggttggaatcctgctgtgtttgaaacagtgattactgcttcctgttctcttgaatttgcaacaccaaatcccattctattttctttcatgggtttcttttcttctacttgccccttaaatgttggcattttttatattactgtgacccatttcttctgtcacttatgcatttttcccaagttgtcctctccaatcctagaacataccagccttcaatatactgataattcaagattcatattccagcccagactgctgaagttcagacctgtatatctagccacctcctggacatctccatttgcatagatgaaggagcctctaaatcaatgtgtccacaacccaagttcattctggcctttccacttgctgctgttcctccacctgaaatgtttttctcacaggccccgcgtggctcactgctcacttcatttatcctctctgttcagtcagcaccttccccaaaagtccccatatgtgccttttccttccctggctttatttctcttcagatcatatgtgtctgaatctatataatatttgttacttgtttattgtttgcgcctcacccccaactagaatgtaagctctatttatctgtcttgttcactattatgtttgagccaatttctggtgtccaaatattaagtgagtgaatacaccatcccccacccccagactgatttctgtatgttttatcttcatgggtgacaccagtcccaccctcagtcactcaggttggaaatttggagttatactagaaacttcttttaccatcaccacatcctcactttcccatatccaacagtcaccagttcccgccagttttatctcgtaataatttctcagatctgtcttctatctctgtccctatgatcaccttatttccagccatcagacctctcttctgtcttattgcacctcttaatgtgcttcctgcctcagtttttaaccacccaaatccagcctcaatggaagccagagtggtctttctaaaaagcagatgtgaccctgctgttttcctatgtgaaactcttcagtgggcccattcaactatgggatcaagtctaagctctttagcatgacacgtgagaatatggtggaataaggtggaatgaatctggtggaataaggtgcaccccttgcgttagactaactgcagggtgtgccccacagtttcctgcctccattcttaagctgtcccctcagcctaaaatgattgtctttcccctctgccttccccctcctggtggattctccctcatcattcttttaagcatcagttttggggtcacctaaactccctgtgctcttttgcattttccttagcactgtacctatacttaaaacattatctgccagccaggcacagtggcacatgcctataatcccagcaatttgggaagccaaggcgggtggatcacgaggtcaggtgttcgagaccagcctggccaacatagcgaaacctcatctctactaaaaatacgaaaaaaaaaaaaatagctgggtgtggtggcaggcgcctgtaatcccagctactcgggaggctgaggaaggagaattgcttgaacctgggaagtggaggttgcagtgagccgagatcgcgccactgcactccagcccaggtgacagtacgagactctatctcaaaaaacaaaaaacaaacaaacaaacaaacaaacattatctgccatgtgtctgcctccttcattagatcagattggaactcactgagggaaaggactgtgtattatttatctttttattctcttcatctaactccatgactgaaacatagtgaggatttgataaacgtttgaataaatgaaagaataatgaatgacccatcgagatagatttctggctgaattctggtcattgtcatcaagttatggcataaaattacatttccaaaatctgaaaaatattagtgtaatctgcaaaatgtgaattcattatgtgctgtgtgttactgaacattgcattgttgcttttcagcaagtgctcatgtcttactttccctgttgtcctattaagttcaaaagtcgacttaacaaaatctaaacagaaaaaagagaatgggggaataggaacaagagaagattacatccatttttttttgtcttatgaatttgaagcattttctcaaatgtgaagaaaagggcactttttcagcagtaaagtaattgtgtttttattataaagtgtattatgttaggcatgtgggcaatatgactcaatgaatagttcttcaggattagtgtatgcctagttgaaacttaatgctctttccctcagcatgcatgtaggatctgaattttcactgtgaaagcaaatgctcctgttggagacctttatcatcaacttgttggaattcatgcctagaatattttaagttgaacaattctatcacagtggcatgcatagattgctgagaaaggcacagtgctaatgatgctgtagacatcttaaaagctaggaatgctccatgtaatgtagatggcagagaaaatgaagtgtgccagtctgttttctgttgcttataacaaaatatctgaaactgagtaatttctaaagaaaaggaatttattttttacagttatagaggctggaaagtccaaggttgagaggtcacatatgatgagaatcttcttgccagtgggaactttctgaagagtcccaaggtggtgtaaggacccagaaatttctgatcttcttctacatctaattgccctgggtcgaggcagggtatcacagggcaagggggctgagcatgctaatgtgttagctcaggcctctcttcttcttataaagcaatcacttcccctcccatgataacctattaatccattagcccattaatccataaataacaaattcattcatgaagacagagcccatatcatccaatcacctcttttaaaggcccccacctctcaatactaccagattggtgattaagtttcaacatgagttttggaggagacattcaaaccatagcaaccaatcccaaactgaggtaagtgaagctgcacagtggttttaaaactgttttactgagccctaagattctgcaacattgtcttggggccacctacaggtggacttaagaagtgaaactgaagctgcccctcattcccactgcaaagagcagtaactctggtacctggtttaaagagggtggttctttattacattttacttgatatttgacttgatttagttgaatataactgttgttgtgttctataatacggagaaaattttgaatgaataaaactaggtatagttttaagtagcaagattccgagtagcttaagaggattaaaaaacaaggaagatattttagattctcacattctaattcttacaagtggagaagaaggggagactgcgttaacttggaaactaatactgatgagcacaaatgtaaagggttatgagcacacaaatgaagggtccatgcactacacctaggaactttaaggaggcatattctgtgaagatattttcaggagtgctgatacccagaaagaattggtgttttggaaacatctagagaatagtcaaaaatgtatgttaatttatgtttgaatcaggaaggaagatatctctctgcctagggagagggagtaatgataacagatgccagaaaacatccaacagaggcaggagcaatgccagcagataaagttggggagctggcccagttctcaacagtggagggtatgtggaccctagaaactcaaggcttgtgagcttggtgtccatctctggcaaagtcctaagccaatttagcagatggtttgagagcactaaggaaagatgctggagagttagcttagtaaaacaaagtcttggtaaacttccatgcttctcttattgatagagtctgtcttgacttcagcaatatttttattgggcagtttatgataaccaatatgtctttttttccgttgagaacaaaaaaactgactcaaggaaagaataggaggggtgaagctcatgccagagaagcaggaagatacttccttatgggcagcttgatggagccacatagaatctgcttaaggcagcgggaagcttagataatctaccagctctaggtgcagagtgtcccctaatactgcatttccccaactgagaaccatgaccacctcccgccttcagagatactttggggtatttatttaaaatgccccatccagaatcatgatctctggaggcatagcccaggaatctatacttttaacaagcttcccaaatacttaccaagcacatataaattttagaaccgttgcttcaaagataagattatttgctgtgaggaaagctacccagttagagaaacagagaaagtctttagttgtttcataagcaggttcattttttatatatgattgtgacccagaaatttctgatcttcctctacatctaattgccctgggtcaagcccaacccaaatgccatctggtgacagccacttatgctgcaaaagcagagctgatgaggcaaatcttttgagcagtaaaatgggattttgcatcaggtaaagaccttaggtgaagagcaatgaggcatactgaaagaaacttagttctacacaattccttgagaaactcagtctccatgctgcctggattgggggcagggatgtatcagtacatctgtaaacaactaattctccagaatagaaaaggtatgcataaatatacacgcatacgtttattttaagtgttactcatataaatgctgtgcggtgcacaattcataataaaatacacattgcattttattgattacattacaattgattctcacagaatgcttttcttgatttttgtcaaactcctgtatccatagcaaccttaggttgcagctgacaaatgagtgtaggcccaacaagcctgttggttgatagcttcatttatatgaacaagtaagaggaaagtaaaacaatgacacatgtcagaacttcacttattcatcaataatctgagcaacttcttgaatcagataatagttttttaatattggaagaatatgtcctcaatattttgtgctgtttacaaagtaatgtctacagacaagacacacttttcatctgttatttacattttctccagcactatcgtaagactttcataaaacgtcactttcagaagaccttaacaaaataataaataaaaccttggtttgtggtgtttgcaagttttgtggtataagtgctcccagcctggctgttttcaagctaccaataagatattgctgaccgtggagctgggaagagatgtgcagtagtgcatcaatatctggtatttccaggtggagaagaagggatactatagatgtaagtactatagatgtaagtaagatactatagacgtaagtggagaagaagaagatactagagatgtaagtaacactgagagcatagacaataaattgtagttaaatgagtaggaaatgataacttttgagaatcatctttgaatatcacctttgacttttgaatattacctttgttttcagcatagtttattgaattttacatttatataatttagtttttcatggtggctgtgtttaataatcagctctcaaaattcctgaaaatttaagttgattcttatgagcttctgtgagctgagtctaattcactactgaatgggcagattttctgaactcacagatatgtgacggggttatatccctgcttttatgcaggagcatatgtatgatactcaggcacatttctatatttgcatacaaatgcagctcctctaaaccagagcataacagtatcatgtctgacaaatgtgtcctgcccctgggcatcacaatgagaggaattcctaaacagatgagatcagatccaatagaacaggtttcctctgtcatgtctgggaaactatttatgactcatactctttgccagctctgtgttttgcatcagtagatattctgacatgtaaaggtacccctctcatgttgcatcctactgatttcagcaaaactgtttttgataccttgacactttctacaagcccttcagaatacagtgatgttatgatattactgctttttacatttccacttcctttcttctacacctgttctgtaaaagggtattcagtttgcaattaaaattcgatggcagcctagctgtggccatgagagtagatttttggagccatttacacaaagccagatatagaatttatttgatgtgtaaaaatttttggagctgaaagtttgagactatctgccacatagaaagatatgaggatttgagccaccacttttgtgtaaattcttattaaaaacagacagtgctgtgcaaggttgtttcttggatagaatttttggatggtaatagaataagctatatacttctagtgcacaattattttctctcttcctgttttctcgctgttatgcttgtaagcaaattgttaaataagttcattctgctccccaagagcatttccagaagtgtcttggaacttcccactgtaggtacctgggctctatcagtattttctgtactgacctttgtaattatgacacaggggatacttaaacaggactttgcttgccaaacaaatataaacacaaaattgctttaagttgctaactgttcttcctgctgtggacattggccatgacccagcaacttggctgctatttcagccataagagattttctgtaggtcctcaaatactatctcaagtaaaaattcttatggagtccactcattccaggttagggtaagaaaacttttctcctaataatgtaataaaattttactttataaaatgaaaataagcaacattctttcatattataaagaacataacataaaaccaaataatcttttggctgagaggaaatgccaaacccatttcagaacatttatgttatttttccatgctctcttcaagccaagttgattgcatacaaatctcctaaggggatgtgcaactgattccatggtcctggctcagggcaaaaaaaatggaaccatgactgaggggttttataaaatatcctttgcccaggtaaatatggaggtgtgagttcacagagacagtcaggtagacagatgtcaggttaggaactccaggctccaaggtgctgatgaccagcagtacctaattacagctcctctagtgtgcacctctctgagtactgtgtgcacgcttgccagcctagaggtgtcttcagtggccatcggggtcctccaacctggagtagcctgtaggcagcatggtgggaagtccctgagaggagaaacattcttaggtgctgtcctgtgctttctggcagttgtttcccttgagacacagccccttttgatccctttatggatccctgtgagtcagaatttggaatgtttcagcctcctaatttaaagcatgttttctttaaattacatttaacttctctacattttataatttttaataataattatccaagtaatatatgcaccgtgttaaaacacacacacacacacgcacacacacacacacacattaccaaaggagagagagaaacagagattgagagagagagagagaaagctttaatttagaatggacctgtgggtccactcccagaggcaaccatttttatttacccttttctagttttaggtttctgataattcccactattctgtaaataatgtactttaatttttggtttaccaactttagattatatatgtatgtgtgtgtatatatatatatatatacacacacacacacacacagcctaacatatatatttatatatatgttatatatgttaagctgaatacttactaagaagcagctatttttgctcccaaactgaatcaaatgctttgtaagactcagtgaagttatttttaaaaatgctggtaaattaggatggagaaaaactgtgaaagattgaagacagtggtaaaaacctagaaggattttcttctcagattgctccacaaatatttttaatttcttattctactttaaggaaatgcaagttgaacacacagacaaaactgcattatgggtatttttttatgtaaaaagccaacacaaaaatataatcagaggacccatattcaaagaaaagaacattaccctttgtcaaaagctcagttaatgttttcagtaaaaataaaatatttacattaaaataaaataaggtttaagcggaggcagtttttggtttaactgactttttcaattaactgatcccaatcgcattagccaagaagactttttaatattagagtacagtggttaagagtagccttcagcaaattatttcacctttctgtgcctagattctttatctgttaatttgtagtaatcatgggttttcatgataatcaatgaattgccttatcacatcattgacacttgttaggaactcgaatgtggagctattgttattgctattacaatattgtaattttgtaaaaaaattagtaactacccagccttgaagtgtgattggaccctccaaaaaggcaacacagttttatgctaatctcttgccacttgaagatttctgttccttgcatctaaagtcttcacttatctccatcaattattcaaaatcttgtcatgttctaattgacttggtatttggctattaactttcctttatggtattatgtgtttcttaggctattttataagattttgtatcataaaatacttaggatatttcataaacaaggaaagcatcttttaaataaaagcgtatttcttcactatattgttaagtatatccagcctcttgatcatacattttgcattgagaagccaactttcttatttttgacagtattcttctagaaagatactctttaaacctgcacagagctgagcctcaagttactgccacttgaaggttaggtacattagtttccctactttctctttcttgaattcctttttccttaattagttggagtacattctcaagtaaatttttcaaaagagaaacatggtatgtaaatgttgagccctttacatttctaaaaatgctcttattttgtcctgatattaaatagtgatttggctaagcatacattctacaatgaaaatcatgttctcttagtatattaaagggattgtttcataggcttctagcattctagattccttaagagaagtctgaaggcagtctgcttctagatctctttatagtcttctctctcaccttgaagttctgatatttcatagcagtgtgtctgggtgtgctctctttttcattcatctttctcagcatttcctaggacagttaataaaaacaagatgtctttcattctgggaaatgttattttttttgccaatttcttcccctccattgtctgttttctcttcagggagccttctaggttagtcttctatgtttacttgctcctttattgctttatctctctttgcttcatattcttagtgtcttcaaagacaaaagtttacctcagagtactttagtatgggtgaaccttttgctccctcccctacttctccataattttttctctttacaagacacattcaccattatttttcacccactctatcacctaactatggagtttgggcattgagaaacaaacaaacaaaaactcagcatgagtttacctggaccattgggctttatttccacctccctaagacaccgagctatccctagtacctatttcataggaatttgggagctaaagatgaggcaggattctttctcctttccatgactgtattagtctgttctcatgctgctgtgaagaaatacccaagactgggttatttataaggggaagaagtttaattgactcacagttccacagggctggggaggcctcaggaaacttacaatcatggcagaaagggaagcaaacgtgtccttcttcacatggaagcagcaagaagaagtgcagagtaaagcaagagaaaagtcctttataaaaccatcagatcttctgagaacccactatcatgagaacagcatggaggtaactgccccataattcaattacctcccaccagtccctcccatgacacatggggattatgggaactatgattcaagatgagatttgggtggggacacagagccaaaccatatcattccaaccctggcccctcccaaatctcatggcctcatatttcaaaacacaatcatgcccttccaacagttccctaaaatcttaactcattccagcattaacccaaaagtccaagtccaaatctcatctgagacaaagcaagtcccttctgcctttgagcctgtaaaatctaaagcaagttagtgacttgctagatacaatggggtccaggcattgggaaaatacacccatttcaaatgggagaaattggccaaaacaaaggggctacaggccctatgcaagtctgaaatccaacagggctgtcattaaaccttaaagttccaaaatgatcttatttaactccatatttcacaggtcatgctgatgcaagaggtggattcccacagccttgggagctccacccctgtggctttgcaggggacagcccccttcctagctgctttcacgggcaggtgtttagtgcctgtggcttttccaggcacatggtgcaagccatcagaggagctatccttctggggtctggaggatggtggccctcttctcacagatccactaggcagtgtcccagtggggactctgtgtgagggctttaaccccacatttcccttctgtacttccctagcagaggttctccatgagggctccacccctgaagcaaacttctgcctggacatgcagacatttccatatatcctctgaaatcccatgtcttctgcacacccataggaccaacaccacatggaagctgccaaggcttggggctggcaccctctgaagcaatgtcctgagctataccttggcctcttttagccatggctggagcagctgagatgcagggcaccaagtcctgaggctgcacacagcagggggggcccaggacctggcccaggaaaccatttttccctcccaggcctcaaggcctgtgatggaagggactgccataaaggtctctgacatgccttggagacattttcctcattgtgttcatgattaacatttggcttcttgttacttacgcaaatttctgcagccagcttgaatttctccccagaaaatggctttttcttttctatcatattgtcaggctgcaaattttccaaacttttatgctctgcttcctcttgaacacttcgccacttagatgtttattccaccagataccctaaattatctctttctagttcaaagttccagagctttctggggcaggggcaaaatgctgccagtctctttgcatagcaagagtgatctttactccagtttccaacaagttccccgtctctatctaagaccacctcagcctggacttcattgtccacatcactatcagcattttggtcaaaaccattcaacaagtctccaggaagttccaaactttcccacatcttcctgtcttcttctgagccctccaaactcttccaactgctgcctgttacccagttccaaagtcgcttttatattttcacatatctttatagcagcacctcactctctgcggtaccaatttaccgtgatagtccattctcatgctgccatgaagaaatacccaagactgggtaatttataaaggaaagaggtttaattgacccacagttctgcagggctggggaggcctcagcaaacttacaatcatggcagaaggggaagcaaccacgcctttcttcacatggcagcagcaagaagtgcagagtgaaggggggaaaagccccttataaaaccatcggatctcttgagaactcactctctatcacaagaacagcatggaggtaaccacccccatgattcaattacttcccactgggtcactcccatgatatgtggggattatgggaactacaattcaacataagatttgggtggggacacagagccaaaccatatcaatgcccatattaaattagtggctatttttataagtccttgagtgaaaagttcagaaccctgaccaacatcagtctcagcaatgtctacttcttctcaagacaacattaagtaataattggatattatcacccacactggtttctcagctcactagtggttgtggtctctatccttagttattcaaaggccacagtaaaaattgagttactcactatcttagaaggcgagaaggcattctctcatgctgaagtttcttactcataacctggctattgcgtcttcctcttgagataatcttcatcccttttttatgacatgataaataatgatgacttttaactgcaactttttctttcttattttgggacaatgagataatggctctcttctagcttgtaacaaattatgcagcagcaaacatctaggaattcccaagacaatatggaatttatgaaaagacaaccaaacaccttatgtttttattgtttccttattatatatttataagtttgctgaaggaagtggcattatttaagccctgtgcaccatgttttccaagtgataaatagcaagctatgtgttcccagtagagagaagcatcataacgtcatggcagatggcagagatgctccctacacttagctttataggattatccaagggtcttctgacacagactcctagaggcacaatagtgggaaataagtatgtaactgtcaggggcctgggaaaccctgggagggaccccagactcttgaggtggaggggcagtactccatagaagtactttgacagaagggtttgaaagggactatgtacctggctattgttggtatttggtaaaactatggcattatatgtatttgtaaaaaaaaaaaaactcttcatctaccttccccttccttagttgattttcttctcttatatttttatgataatgtctcatcctttctaatacctcttatttctgttccatttattattatctaacccaaatatctttcagaacatcacccaaatgtcttccagaacttcatgcccttttgggcctgatacattagcactggatatctaggcctactggatcattaccccttatctgtccacagataggaaggacctctgtcctactacttcttttgttttcctgtgagtcccccattggggatatggtggagaataacatcttacataaaatgagccattttttttggctttgctgtctttcatctgagcctactgcatttgtcctccttctcatttatacttgttcttactatttctgtctcctgatgctgctcctgttttctttgccttgttgtctgctaacctctgttctgtccatagaccactgtctgatctcccactagtgatgcagcctcaatttcttccactctttcaggtgtgagaaccctgctctctctatggctgctctttggagtcttcattattcctgtctccagtgctcacatttctggtatttagggaggcacttctatctcaagcccagctttttatagagagtgtctcatggcaatgctgcttggacccctggtgatacaggatgctgatggatgcccagaaaagtgtgaaaagttctgtgcatcctcaggagagcaaatttccatctagggccagaggatctggaaaatgttagtaaaacacctatttgtagccctctttcctgcctcagtctccagagcatcatttgagatgtgctgcagactcccctctttcctcagtatttgttcaggagctgcctgagcgctctggctcctgttcttccatatgtacctttgcaaggcaaagatcctatctagggaccagatttcagtaaaatgagacaacttggtttatcatagaaacagaaaatagaccagtggttaccagggtctggaggagggagttagtatttaataggtacagagtttcagcatgggatggtgaaaatgttctggagatggatagtggatcaccactaccacagcacaacaggataaatgtagttaattaccactgaactatactttaaaatggttaaaatggtaaatttgatgttatgtatattttgctacaatttttaaaaacatgaataaaaaactctacttggtttaaagagaagtgaagattacagaaatgtcttaggaaaaacaacactgcctgctcatagctatagctcggtccactgcctgttatgcagaatttctgtaactcagagagggcaggcctgaggagaacatttttgaaaagaattggtattctttgtatcttctagtttgatttaagagtaaactgtgttgtaatcttaagtattatttttctttattgatcaatgatttttagaacaattactacatttcttggtcatatggcattgttaataatcactctaatgagtaaatgccaattgctatgcatgactactgataaaaattaacaatttagaagaagccatcttattttagtagcatgaattatttgctaaaaggaaattgacttcaaatcatattatttgtagaaagctgacagttgaatacaaagacacaatagcttatgcttttaaccaaatactaatagtcgaaacctgaccatgctttcagcacagacagatccgtgatctggggtgtagaggtgggtttcaggtataacagtacaagtagtaaggagttttacattggaacaaagtctgtgcttttaaccacagacaagggttcaagacagacaaatgaggaaaaaaatagggaaaattttgaaccaggagtccactctctattctgacactaggcaaccttgtagcttggaagtatttctcaggagagactcttttaaagttaatattgaccatagaagcaagactatttggaactatcatcaggcactaagaacttctgaagattcatttccctgaaacagtctggatgggccactccagccccagttatataatacctcgatgagcagcagctcaatacaacatgttgtgaggttaatttaatacatgatgcttgtcccagaaccaatgctccttctactatactgctctgcctgcgtggagtcttaaatgtttagagaagcatgaaacactgtatcattttcaatcatgatgaaaatgtaatcttaatgcctattgtatatgtatatatacttaaacacacagcttctttgccaattctttttcctaaatcacatttttagtggagtaaggaatagttataaaatagaaatgttatgtagcttagaattttgtaactcattaaatttgagttcctctggtgtggcaggtatcttgctaagttgtaggagacactttagagatagattttctcacacaatttgagaatatgagatctggaagccccttaatatataaaagctcatctcattttgtatgttaggaaacaactcagtctacagtgaatcattctgagtcccagtggaaacgggtgatagtcaaactaggtaatttgaggagagtttagtacaggaacatataacaaagatatggtcaggattcaaggaaaggatcaaaggatagtgcaatactccagggctagtaatagtagggagccattgctatccacaggcctgaaagaacccaaaaaaaagagctgtggcttttagtagagggacacatgcaatggggtgacttagcgggaagaaagttggaggaataaatgctataacttcactcatctgccaccctccaatatccctctagggcctccttttggttgaactcaacagaatccaaatgcaaaggaatcccttattatagtccatgtaggtcagcctcacagagcccaaagctgggaagagagtggaggagagtagatttgcaatggtaaatggaacttccatagttccctactgaaagacttaaaatgcaaatgttaggacatggtttcagtattcatcagatgttggaagagagtctttgactctaaagggcagcacatataaatgctgtgttatttgagtacaggatattttaagtttctaatttgaaagagaaaatattgttttacaatcatagaattataaactgaaatgccgagaacctgagcagcctgcagatactcacacacaaaatacattggcccattgctcccaacagctcaccaggactcaccaggggctctgctccttctttcaagaactatgagaaggctctagggagtgtctcacatgtgtttaaaaacaagtctgcacccaatctccaagtcattttctcatatatcctgtgtcttgctcaactgctgtgctctggggaaaaaaaaaaaaatctcctcgtgtaactctcttcatgccaacagaagcctggaagtcttctgcccataccaacataagtacagctagcagacagcatgtatgcagttctgctctctaaacacatgcatggccatgtgtttaaggatcaaggccttgtcctgaaggtgtccagctatacctgaggaaggccaggaagggaagtgtgcctaatcctggggtttggagcaaggacaaacatcccaatattgcaccatgccttgtgtaggaaggtgaaggtcaaatagaagggagaggcaagactgagtgtggctttccaatcaatcaaaaaactcacttcttggaatggagaagtgaggggtgagagaagtgagcaggagcatttagggaaaagtcacttctcatggaaggcaaaaatgggaagaaactttcccacattatatattgctttatgagatttttctaaatgctcattcacaaaggtgattataagcagccttttggtcttgttccacagggtagatgagaggttaaaacatgaatttgatcaaagcaagacaagatctggccaaggaaatgacatccactgaagaagtgtggaaaagggtcctgtgggaagtgtaaagatttgagccaatacagtagtgccaagcttaaaaagaatttcagccaacactatgaaagcactgtgacaggttttatacagatgcaagtgcatagccaggctaggaggaatctcttcccccattgtaaaggtgagaaatggcccaggagagggtgcaggcggcccaaagtctcacagcaggccacaaagctggtctccatttcctgaatcccattcccctccaactccacacagccctacagggcaggttgggatcccacttcctgtggacacaccagagggttgttgacctctttggcctgtccccagtccctacatgtttttgagtttcgtttcacagttcttttcagcaaaaagtctcaatggtctaaaactctgcacatcagattttctgtaatttcacaagaatcctagcacatctgagtgtttccatttacactgcacaggccagaatccaatggtgtagaaaacattgtagattttgcaagcacttccaattatgtgggtgtaaaatatttttaagtagattttcccccaattaaataatttctggagcaatcgagtaaaaagaaagcagaaacccagtagcaaacctaataatgattcctgaaccttcctgttaggcagcaagtggggactcaggtgcaacagggttatggacacaagaacttaaatctggctcttagggtatatggctccaggctgtcagtgtctagcttcagcacccctgccccatccgggcaatgcaggggtggtgatgccagtgtgaagaggaactggtcacgctgatgagacagcactttgcaaatagaaggtataacagaaagtgttctctcaatgctaattttaggccagctccttagttaacataggcagaatcatctgggcagccttctgaggaaggaatcagagagccagaaacagtcatatttcagatgttcttccctctgtgtcagtcacaaaaaaaaattgcatttaatgccatttgccaatttccatgttccaattcattttactagccctcaaacttcttatatttaaggcagcagagtgctctgtttacctggctcagtgtcttaaaaatggtatggccctgcagacccaagttaatgctccttaatccttgcaattttcaccatgaatcagagctaagagagccacatacatgtctgctgcaagaatgaaaagcaggaatggccctaagttttagccttcagttaattagtactcactgacttatggtcactaatgagaagtattatagtggttttcgtcttagatacagacattgttgtgtactgcaagtcatatggcagtttcagaagaaccacataatatgagagctatgcccaaacctgttgtgatagaggaagatcactgaggggcagtgacccaaggtcacaaaatataaatgatggcaaagctggtcttaggtcacttggaatatacaagctgtttcccagggacaccatgtaaagctcagcaagttgtgccctgtgcaacttgcatggccatagaaagaagccctcactttctctttctcctgctgaagtcttttggccccatgacagatgacctgggttttatatttgtataagagaagtagtaataagtaggatttggctcactcctcatctatggtgtctaagtctatttgggctactataacagaatgcaatggactagatggcttataaacagtagaaaattatttctcacagttctggagactggaaaattcaaaaccaaggcaccagcatattttctgtgtcctcatatggtggaaggagtgagggaactctcttaagtctcttttataaggatgcttatcccattcatgagggcttcaccttcattacttaatcatctcccaaaggctccacctcctaataccattatattggatgttgggatctcaacatatgaatttgggggggacacaagcattaaatctatatcattccactgctagccacccaaaatctatgtccttcttaactgcaaactacattcattacatccctaaagccccaaaagttttacctcattccagcattaactctaaagtctaaaatccagtctcatctaaatattatctaaattaaatatggatgagacttaaaatatgatttatcctgaggcaaattgctcttccagctgtgaacctgtgaaaccaaacaagttatgtgcttccaaatacaatggtgaaaaggcataggatggacatttccattccaaaatggagaaacagaaaagaagaaagaggtaacaggtcctgggtaagtccaaagtataaggcaaactccatgaggtcctaaggctcaaaaataatcctctttggcttaatattctgccccccaggctcactgggactgagggcctgcctggggctgtggctctgccccagctgctttgccacatggcccacacacccacacatctgggcagccctttccccatggttctcagttcagtggggccatttggcctattgaaaggaagacaattgccatcccttttgaaaccaaggaggcagccctgatgatctgtgagtcttcttcaggattcttgataaatagtgaatgttctcagctgaatagcattgtggtcccatcctgtaaaatccaaatctgacagccttccttcgttccttctcttttccttcccctttggttcaaattggcagtttctctgctggggtggatgattaagtttgtggttcatacctatactaatctcttaaatagtcagttggccacactgttagtgttctcttccaaacgtgggttctcattttttgcaatgtggatagactgagaattttctaaatctacaagttctcattctgttttgcttaacaattctgtctttaagtcattctgtctttcattttactataagcagctaggaggagccaagctgcaccttcaaaactttggttagaaatagcttcagctaaatatcccgtttcattgctcccaactaaatatcctgtttcattgctcccaagttctaccttacacaaaacagcagaacataaacacaattcagcaaagttatttgcctttttataacaaggatcacctttcttccagtttctaataatatgttcttcattcctctctgagactttatcagaatggtctttactgttcatatactaccaacattctggtcatgggcacataagtattctgcaagaagcttgaggctttctctacagctctcctcttttctttctgagcctgcaccagaattgctcttaatggtccattcatggcagtgtaagctttttcaagcatgcacctcaaaattcttccagtttctacccattacataatttcaaaactgctttcatattttaggtatttatttgtttcaacagcacccccatttcttggtatcaatttctgtgtcttatgaaaaggcctctctgaactccatgtattggtttatgtatgcctgacttctaggctatagtagtactctataaattgcaactagcactcttgaaattttcttgattagtagttccttgagggcaaggattcgttttatttattttatatccctaattcaatacttagcaaatatcaggtactcaataggagctccttctcttgtcctcagtaattcagttcaataagcaccttttgagcacctgacattggtttgatgccaggccattttttaaagctgcaggaagcctcagtatttagtaaccaaggtgattatttatttgcaataagtctgatatggagcagccaaatcctgagatacctcatgaaaaaaacagaaacaataacttacattcagtgagcacttctaccttcctaaatattcactaaacccctaagagataggtactattattatcccaatgttactttgacaagacaagatacagaaaatttatctatggttacacaatgttaaaatgcatatcttgactgtataattctataacctgtgtttacagctactgtgctatggtgcctgaagtataattaaataacaatgttttggcaatattgcatttcccagacaacttaagttcaatcatttaaacaaaaagtatctgatttaaactagaatctattacatgcttcttattcaagatgttgcaggatcaccactcaggatgccctctggcctgttgaggtgtgtatggatctaagttctccttcactggataattccagaatgttatgatgcttgaactcaacaatttctcctccttcctctcctcttcttcctccttcttcttcctgtgtctctttctttttatttaaatatactttaatttttagagaagttttagtttcacaggaatattatctttttaaattgcaaaagagagacacattcattttataaagtttaaaaatacagaaaataagatattaaataaaggctttgtatttacgtgaaagggatattgatgaggtaattgtggcatgaattgttctggattatcagtaagatttcattgtgttcattcttaatacaatgtttcctcattggttcagcaaaatctgaaacacttaacatcagagctgtctggtcccacctgtttccactctctaattacattaccaccttccctacaaagcaccattgatatcctcaagttctccatgggctgattttctaactaaatttcccagtattatatttattagccctccccctgacacacacacaatcatctgaggatcaggaaaatgtcttgtattctgaaccacggtgtgtgtgtgtgtgtgtgtgtgtgtgagagagagagagagacagagagagagagagagagagagagatcagatttattcagagttgagatgcttgctaaaaatggagactctggacctcacccaagacatattaaataagaatatctaagattgaagtcagagattctgcctaccaaaatatgttttatttttactttccatcaggaaattgacaagcatatttaaaagtagagaggttaatataataaactccatgtactcaaaactcagtttcaacaattatcaattcatagtcaatgttattttacctataatgtgaagcaaattgtgacatatcatttgactatttctgtatgtatttagaacacataaccacaatacaattatcatacctaaaataattaacaataatctctaatattattacatttttagttcaaaacatttcttgttttgtcaatgtgtcttagttgtatggtgttttaaacccaatcacgtagctggtccaggccggactggcccctctctaggcctgttgctcagctcgcatgctgggacttccttccaccagtcttccaacttcagtacagtttctcatgtacactgtgttttctgcctcattttaatctcctacattcatcctcaagtaacttgctatgataaatacattgaaaataatttttctgacttgttttgaaagatgactttttcagccctcatgctttattgatatcatgtttgggtatagaattctagtttgaatgtaattttttctcagaagtttgcaggcattattcaattatctatggtttctggtgaaaattctgatgccactatggttctaatttctttgttattttttcaaattcattttgtctcttaagttttgtgactttctctaatcttcatgttttgaaatttcacaataatgcaattaaggtagtgatattttattatagatgctcagcggacccctatcaagttgtccttcggttctaggggactttgtttttttctttgatgactctcaccttcattctctcattctctctgtcctcacttctggaaaatttaaatattagacctcctggataaatactctacatatcatatctttcatttaaatttcccaagtctctgttttgtttggttttgtttttctcggtctacgttcaggtacctgttccttgactttgctttctatttaatttttcttttatttcaccaatcacattattttacttctagatcagattggatctcaagggtgtctttttctggttactgctgcagtcacaattctcacccttggttgctgttttataaatctcggtacatgaattaatttgcctcttgcattactgtaattcctttcatgtcaggggccatttattctgatggctcagcttggttacctcttttgaggtgttgatttgcccatttcttccatggtttttctttttttgtctgtttatgtgttcttcctggcccttcacagtttaggaagacaaccaatttttctcatccatgtgagtatgtgggcttaaattttttacttgttggccagtaatcaccgtcactctaatacaggtccactttttttttaatgcttgcaggaatcctctagtattacaggtgtccagctggaatgtctgctgggtctaaggtgtcatgggtgtcttctatctggtgtgctagggatgttgctacaatgcatcacgtcttatggctagagctaatagccagtagaagaggtttctgacaaacaggcgtgattacagggcatctatgccacatcttccctgggaagaatacactccatgcagctctgggtatagttttatgcacggtcacccccaaaacagcaatacttctagggatttggatcagaactggtttgccatttgcctcttttcttccttgagggactatctggctattacctcaactcttggataaaagcactaattatgctattcctgttctttagaaaaattatgtcacgactatttttaatgtcatatatttttcaatttttaaaatgagatataccataaatgacaataatatatctcatgaacacatgtaaaaattaataataaaacaaatggtcatgtttctaccacctaacttaagaaataacatcttgtgattctaagctgatgctccctctccatttttggaggtcatgggtctgaggtgggaagtatggccttagtgattccaaagtagctttctagcacctctttctgaaaaaaacaagagaaaggtagaaatgtactatctagaaggcatactcagctatttctaaacagaagtctagacaattatgcttggtgtctggtgtggctgtgtaggtcactattggtgtttcctataggcatttctctctggaccactgctaactcacacagcacctttgtgtaaatcagaaaaaaagccactcctgccatttgctacaatttaaaaaataacaatatgcacaacaatctgtaatgactatgactgtaactggtgccccctagagtttacaggccacaacccgcacaaccataattcaaggtagacgtagcagatagtacaggcctcctcagatgggcttcatcacttactgaatgcctattgtgtgccaggaactcttttagattcttggcagtcagtgttgagatggacaagatctctgctcttctggatcccccacgactggacttctgagcaggctgttttgtgagtgcatgagctgtagtcaactaacaggctggagttgttcttaaactgggtcaggggtcctatggttactagttaaagtgaggcagaacttcaatttacttagcatgctatctatgccaagtgaatcctgagaggtcacgttgtactaagctgatgagttcagaggtcacatggggttcttaagtttatgatgaccctacatcctaattttccctggacaatcctaggttaagtatcttatccccatgtaattattaatataaccccttttctctcctaaaagtgtcctagctttggacagtaaattatatgatcacacaaattacctttttttttttttctgtgccaacatcccttcaaaatcctagtgacttaatacactaaatatttagtttttgctaatggatctgtggatcagctgtagctttgccccaggttgtcagtcaagtttaagtttactccttattttggactttgggctaatgccacaagtcttctcattatggcagtcaggctggaagatcagctcttatctgagagctcttttctcatgcagaatgtgggagcacaagggacctttgcttcaaggtggcatgggccatattcactcgtatttcattggccagagcaagtcatatgcccaagaccaacactggggattgggatttatgcttctcccttggagaggagccctgtgatagggcagagtgactaataacacagttatctcatcacattcctaaatcctacggcctcccagtgtgccccttctccagcctttgctggtggtggtctcctagcagtgtctgtgtcaggacagagctgaagtgattaacagaatgtagagaagaagttttgtctccatttagactacagaatgtattaagagatttcactgctatgtggagcctattttgtgttggagagggcggggattgatgtttgcagcctgattacctgggacagggtttcctccttcgtggtcccccagcactatcacccatcacagaagtctgcaccagcatattgtctactctcctgtgtgagcggtcagaaccaggtggactccggggtcaatccatgccctccccacctcatgttgggctctttgaggtatagttcctagccccttttactttgaccccactgactccactccctatcccccatccctgcctgttgctctgcacctgggatttttaatttttattttctctcagtctcccttcatttgcctgtgttaaatgttcaacagtaattggcttttcttttaaaacaattccagatattcctcaaagttcctggttaactgatgaattgatgatgccctttcttattttccattgcttatcccatttctgcgggatttgaggagacaaaagtgaaaaagatttgcagagttacccatattgaaacttcaaccccagtattttcaaacagagatataatattgtttcagtagaaggtgaagattgattgggcggcaaagaggaagtatgttaaatccatcaacagtcctggcagctggctttcttttaagagcaatttttgataaacagttttatcaattcacaagaatgaccaagtaccttcagagtcatattaaaaagcaggtgggtggtagttgttcagcttgactcagtaggtaagtgacttgcaggaggggttcccatgcatgcttcagcagaaatacagctttgtcacagatcatagtatgttggcagtgctgtgcatagttgaaattgtgagtactatttagaactcacaattagtcatttactaatttctaattttctccttcgttagaatatgaatctgtgaagacatggcgtgcgcctatcatgttcctcattatatctctagagcttagcgtagcacttggcatgtagtaggcattcagaaaactttggttgaagcaatgcaaatattaatgatgggcagtagaggcaaaccctggggagaatccttggggctccagagtgtaatgaagcactgtaatgacaggcagggttgtcctttaaaataaggattttacagccaccataatgccagaaatgcattcagattgatgctcagcctccttggttctactgtagcctggggcagaagcctggagggggtgaaatgttttgaaccttaggggcatagtcactggatactgaactgccaagacttgctgatgccatggggctgtggtccatgatccatgtagcagatgctgtcattacctgccatgtccccttaccacttcattgtgtgcctgttgacctccagtgcagcctctgcattgatttcagtgtgggattttcctggccactgaagcttactttgttcatctgggctgcaggtttcaaatgatgggaatttaatgccctttgagaaatgccctctaattaataactaaagagagctaatgtgtaataccttggatcccttgccacttaggtggggtatatctgaggtgtattaagcctccatagcaggtttaacctttactccctcactgtaggaactggcttgataatgtaccttttattggcttccttttctggatcacttctcctgtgtttccttctccttctaaataatgcttttccctttaatacttgttttagggtatgctactggggaaacccaaactacaatattctatcctgcgtcctgaggacttatcactgagtgggggttgttcttgaagctgcaaaattcacagaagatttgagcttcattttgcttagaaccttaaaagttaataggaaaaatagaaccaaaaaagcactctagtttctcgtattttaaaaagttatgacttacacaattccccaattatattatacagctctctgagatgacagaataattgttaaggacatttgaaactgccctgctcaaaaaacattaatgattggtgctgcctgtaggatagagtctcatttaacttgaagggcattctagtccccatgaatatatccattttcttgccatagcaggctgtttattgtttctaaacatggcttgcatgctatggtacctcctctgtgtttctgctcactggtcctctggtttgtgtatgaattctcattgtcaccgtcccagaattaagtaacccagccatgcgccccagcatggccttccgcagtcggctcccaagggatgagtggatgagagggtcattctgcccacgctgtgcaatgggtgggcttgaggggaatgaccacactgacctttgatctttgcttctttgcagatatctcagtgagcctgctgacccttgtggtcactgcctgtggtctcgctctctttggcgtgtctctcttcgtatcttggaaactctgctgggttccgtggcgagaacgaggcctgccctctggtagcaaagacaacaaccaggagccccttaactacatggacacagagaccaatgagcaggagaacagtgaggacttcctagatcctcccacgccctgccctgactcctccatgaagatcagccacacctcccctgacattcccctctccacccagacggggatccaggagaactgtgcccatggcgtccgcgtgcagcgccaagtcacagagccaacctcgtcggcccggtcagtaatgccttctcctttctgaatgcaaggaaggaccaccccattcccctctctggcaacaatagcactgataggtcaaggagcctgtaaccttttagatttctgttctgtatcagagacatgaatatgggaaaactccatgcttcctacgccctccttggtctctacttagttcataaaaataatagttaacatcattaagacagcatgtgtgaagtactctataagaactttatattcatattttattatagctcacaacttagcatgaaatgtatactattatcattcttattttacagcagaagaaacttaagtcaaggcgattaaattttttaaaaagctgtatatgtaaatacccaggtcaggatttgaaccctggctcaaccaacacaagaatctgagctcttaaccacccttccctgctgccctcctactgctttagaatttattccctgtgcatctgacctatcctaacagtcacacacaggctctcttcagactccgccgtgtggctggaggtctttgtccgtctccagcctttggaaggcttacagagtaccgatacctaggtcactctcttttcattgtctggatgctttatgctcttcagcagtagagaaataatataatgcagtgaaaaaagatgcggtctctcaagtcaaatgaattggctttacttacatgtgtgacattgaacaaattacttaaactccgtatctgtccatttcctcttcttcaaaagaggagtagatagtactgatttgtaggtggttttaagaatgaaatgatgacatgtgcttgcacaggtctggcacctggtaaatgttccaaaatgtgagctgccattttgctgttagtattgctattatggcctctcccaaggctcagatgttgcacaaaagtgtgtttgaggctaagcagccagttctaaatcactggatataaaaactcatttttgataagatatttcaggaaaagagactcaggaagcagctttctttagaatgaaaatattggcctgagtgatggccagagaaatagcatgtgctgttatttggaaggtataaacacaatttggaggtattttttaaaaatatttgctgtttgttctccagaaacagaaataagactttaccctttttatgttaatcgagtttatcctagaggctccactcattctcattaagtgggatggaatatgccagtttctaatttgattgtttcagaaacttattttagcatcattttcaattctgaatcaaagagccaaatctaaaatatgcctctgtgaggagatgggtagttgtctgccgtttgatttagaagaaatcctcagattttatcactaggatttatcttcagatttaaaacttaaatataactagagctctatttgatgctgtcatagagttcatgcaatgtgcagacttataataaaatcctttcagtatttcaatagctaaagccttttagatagagtctccattgaaatttccattgaaattgccccctatttggttctactctgcatgtaacttttctggtctgagttcctccaatatatggtggtagtactgtgatcttgctagatttgatctggggactctgccataattctaacaaactgatagcaatgatgccactataattatcacaatatttatactgggaaagtatataaatatactgcatagcaataaggatttgcttaaaaaataactgttatcactactgatttgtagaaattgggtagaaggaaaaaaattaaaagggagagtgaaggaattatccctgtaaaatgcactttgtgttcagatttattttagttttgaaggcatgcaattacattatcttttctgatggcaaaaatcaagtttagcaatatctgaactactataagaaaactactcttttctagctgcatttgacctaatactgacaatttgcatttttatgcatttaaaacattcatacctaagttactactgacctagttttatggggtctgtctggaaatatatatccttgtctcaggatctcaccacaataagagcagtacatggtcttctaattctttgaggattgtgttgcatcatgagaaaatgcacacacacatacacactttttgctaacaaaaaggaaaaagagaatgaaatttcctttatgcctcaaagcatttttaacattcttctttaacattttcgatacccatatttggggaggggaaaggtaagctttgctgagaaagctctaaacagtctgcttttccagttactgtttcttctcttttctttctcattatgttctttactttctccctgccgacaccgtcttactgcttccatcctgcagccattatcaccgtctcaggacagccatgatcacagtctcagggttcccagtgcacgaaagacacagcctccatttaaaggtgtcttcaggatccttgtgattggcacagtttctgtcacaccattgacatcaaaaatctcaacctcacctggcctcttcggcttggatgtgttcttggatatgtttggctgacacagtgcctttttgaaatgtcctaaagatgggctttgttttatcttctaagaatgtttctggtcagaatgactttctgttgttctttcaagatcaagcatgttcggtgtctagtttcttcagtgactattagtaccatccaaaattcctgtcaattctttttgatttgaatgaagtcccttttgtacagtgactcaatatgctggaaatgtggatgtttcaattttctcagaattttttaattccagagctttataaagttctctactccaaatgtatgaaaatccctggatccccaaaatagaaggaaccttgaaaggccatctaatccatttcctgattcatgtcctaagatgaaagttcatcctatttttctcaagccttctcaaatgtcttatgtaacacttcagtttttcaaaaatttcaattaccacaccacaaaccccttatcaggtctattaaggccctgcattttaatactgccacagtctgcttccaacagcctcaccttatggccaaggccaccatgttgcagaaccctaggggactattttaacatgaactcaataggagactgcctggaagaagcttgttgtactgcagctgcactagcctctctcttagttccttcagcatcccaagccccttcctgccttgaggtcttcacacgttgttccctcagccaggaatgcttttcctttttttgtccttcttgggacctttacttcccttacaccctagctgaaacatcaccttctcagaaagttctccccggccactccatctgaagtctgtgttctgtcccccactccttcccactttaattctccctcgcattgccttgttttcatgccttcacaggattaaattattttaagtgattctttattgcttgtactcccctctagactgagttctgtgagctcagagaccacatctgttttgtttcttcctgtctatccagcccctagcaccacctggcacatggaggacttttttccatgaatgactgacagaatacattggtcaatatcaggccacttttctcatgctcttctgacaagaatgacaaagggccagaagtataaactgagcagagcctgtaataatggtgtgaggctggcggaaggccatttgtcccaggtctcacattcattaagagccccacattaggtttttgaccttacctctgaattaagcaatccgtagagttacagaaatatgctgacagaattgaaagaggaagataaccatcacactctaaatttaggtcccatgactggccacaactcaagtaaatagtacacaaaaattgaatgtaattatactatgagtagcacatttctattaagttatatttttgtgtggtgagaacattggttcaatgtaaacatctaaaacataatttttgaattatagttatttcttcagatttaaattaactgcttcaaaagtggaagttgcctagacctatctcaacttccacgagaccccgaaatgatatgtaaatgagtgttttctctactgggattaaattatcagaaactattatatccatagcatttctatatttactctagacacagatatcaagcatttgctatggcaaaattcaatattaggtggtggcaataaagagagaaaaaatatataaccatgcccacaaaagacccacagcaagagcaccaattatacacactgaagtgctcaatttgttctttagaagattaatctggaaagaatgcataagatgcatgggacagtggtgaagattggatgtatacaggggcctgtctgagggcctgaactcagctaggatcaatgggaatgaaaagagacataagacgtgagctactgtagagaaagttttggtgaacaaaggctcatcttagttatggaggataaagtattcaaggtttcaaatccgtttaactttggagggagtgggaggaagcaggtcttgcctcagtgtatccacctacccttgacaacacacctccactggccccaaggcctgatgcctgtctcgtcattatctcacttatgctggaaacccttgaatcttcagcccaagaaagcctcagattttcacttcctcctgcccttgtagtctactaactgtgtctgtccctatccaggatttccccttcttctgtgtctgcctgtggttcaggaaaacctaactctctcttcttcatcaccaggggagttttgaagaaaaacatcctgtctccaccatttccataattccctgccttgacttgaacataggaaagaaaccagtaacatttctgaaaccacaatttgcttctctcttttttctccttggatcctgaagccttgtagacactggtgcccgagaaccagggaaaggacaggtcaggtttcacctctgaggtgggccactgcagtgaaggaacatatattagggtgcacttgttcatggcttcacatgaaagcccgcgatggaaggggtgttggggatatgagtgctggcttgtacagagcctggactcagagatgcagtgggtgtatatgagggactctagaaaaagctgctggggcagaagagctgaaagtcccattctgctagagaggtaggaccaagatgcaaatggatttaatgtccttattgacgtctacagcatccgcttgaggtggctaagaatgaggccaagttaagtaggcaagcccagctcaagtatcatctccttcataaaagtttcctcagccagaggcctttctccctctcatcttctggtgggggaaccatctcatcacccgcctggacagccattttcttcaagatggtgactacattttgcctctctgcaccttccaccccatttgacactgctttgcaaattcgaatttgttgaattgccattacgtcctgtctcttaagatctgatcgacatagttggcttttcgggtgatagtttagggactaacctagagctgggactagttaattcacatctgaggaaaggaaaggaggagaaaaccttgtacctctgggattctggcctttcctgaactatggctgcaactcagcacaagactcaggtttctccaggcgtgaaagtatgtttttgagtttgttttgggaaatctactttgcacattttgttaattatctttgaactcaagctttccacaggttcaactgctattcttcccacttaggtctggggtagccaagtctaatctttattttctctttgttgtttcttccatgagaggaaaacagcttttgcccacccagagagagaatgggaggtggatgaagctgagagttccaaccccagcagccagcttctctacgacagcattagggtgtggcttattagtagaggagatcatctctcaactttccttctgacccactgtcgttggggtccactttttttcattcactgtgcacattaagtcctgagaacaccaaaatacgggactccccagacctactcagaggactgtctgcttcagtcacagatctctctttgccaaattcctacactccctcaatgtcattgtccttgtcagtcagtggctttgaaattctagacccttgccctgggagcctcgcatttactgcactcaaaaccacctccattaaccatttagagccacctcacctggggtgggggaggctcaggtaatggctctatattccgtatctttcctacctcttgctttgggcttgcgttttcttcccacctctgtttgagtagcctatgagaactatagaatattgattttccatttcctccaccccctcttctcctttacgcccctggggcagtctccctgctccacttccttattttcagcccccagacctccagaggttatacagggaggttatgagttaccctggttctctggctcttctaagcttctctcttcttccgtgcctctccccgaactccagtaaactctaactctcttctgaatggaaattgaaagagattgaaagggagccccaggagtgagaacctgtcatgcccagttacagtcttcgctgtctgctttaagccactaccttacagttagattcaactgatttcccaagagtaagtgtgattctgaatggaggggaaagtgttgggaatgaaattatcatgtaaaatgtttcagtagataatagtattcatatctgtgactggttttttgtttgcttgtttggtttttggtttttgagtttttttgagatggagtctttctctgttgcccagactggagtgtagtggcgtgatctccactcactgcaacctctgccacctgggtttaagcgattctcctgcctcagcctcccaagtagctgggactacaggtgtgtgccactatgcctggctaatttttgtatctctagtagagacagggttttactatgttggccaggctggtctcgaactcctgacctcaagtgatccacccaccttggcctcccaaaatgctgagattacaggtgtgagccattgtgcctagcccataactgtgattttttttttttttttttttgagacggagtctcaccctgtcgcccaggctggagtacagtggcacaatctctactcactgcaagctccggctcccaggttcacgctgttctcctgcctcagcctcccaagtagctgggactacaggtgcctgccaccacgcctggctacttttttgtatttttagcagagatggggtttcactgtgttagccaggatggtgtcgatctcctgacctcgtgatccgcccaccttggcttcccaaagtgctgggattacaggcatgagccactgcacccggcttgtgattggtttttaagaggtcagctgtattgggaatttttggagggattcctgtgcaattgggttctcagggaatgggatctttcttcagtctttgaactacatcaacaacccccgcctccctgctggcaatccactttggttaggaagagctgagcatgtgggacaatttatcttcagatttcatgtctaagaaaatgtacatgtagaacagaatatgtcacactactaagtagccaaatccatgtattttaaattaaaattaaaactatggtggccaggcacagtggctaacgcctgtaatcccagcactttgggaggctaagttgggtggatcacctgaggttgggagttcgagaccagcctgaccaacatggagaaaccctgtctctactaaaaatacaaaattagccaggtgtggtggcgcatgcctgtaatcccagctatttgggaggctgaggtaggagaattgcttcaacccgggaggtggaggttgcagggagccgagatcgcgccattgcacttcagccccagttgacaacagtgacacttcatctaaaaaactaaaaaacaaacaaacaaaaagcaaaaccactatggtagatttagtcctacagacaagggtgaagacaaaatgttgctgtgatgaatcgaatgccagtactaagaaaattcaaagggaaattgtaatgcacagtctgcccagcaaccatctgcggagcagcagagtgacagggcctagggctgacatgagattattgtctgggactggattgtgtagacacagaattgttggtccaccacagactcatctggaggaggagcatccagtggatattgaggatgcacttttatcatgtaaacagcaccacttactagacagtacccagaagggtgggaactgatgcaggacccaattatggacattttttgaagaaaaaatgtttcttttgtaaagaaaactcaatagcagagggaaatagggctggcaccagcctattctgacctctgcatatggcaggttactttctgctgcctcccagtcctttctgcccacagagtccagtaaagtgagactcaagctctattctagcactacattggttccacttctggacaagggagtgatctggctgcactagctcagaaagccagttttagatgcttaacagcaactcctgccttccctcccccgcccacccacatcataaaatacagagaaaccttaagagtgtggatttctctaaaagagattaaaatctcccttcagcaactctcagatcacaaagtttttgtgcatgtgggaatgtatgtgactgggctatgtctgcttgctatggactgtgttagatgtgacaggtaccagtgacagctctgtgacggtactcttgtcataccaggtgggtgattagtgattaggaggctattttaggataaagaggaatgctcagcataacaatatctgtggtgacaagggagaatactttcaaatgtgtctgggggtcccttaattccatttttacgtctttatttcattgtctgaagaaaggaagagaagggcaaattcaaatgtttactctgcctctccaactgtttaccaatccctaagagacatcccagctgttctctttcaccttctagtaaagaggctattttaattaaggttgttgagcgaatgcatacaatacaatataatgactctaaactctgagctaaaaacaacaaaagtaaccttaaaaacaaccttgtatgtgataactacttctctcaacttgggaagacacacacagatcagacaggctttaaagagaattttagggaaacttctaacccaaaccaatacacttacagggtgaagaagactatactacagttgcaaatatttagtttggagtatcagtatccagccatctccagttgaatccctacatgcatttatagtagctcatctttaatttttgagccattagtgtttatttcagaaataaaacctgtcctcttgatcactaatcacccatgtgtacagcaaaagcacaatcccaattatgtcacttctacctgtcagagccaccacaatccactgcatgcagacacatcccagtcatatacatttttgcatgagcaaaagctgtgttcttgtgatgaaatgatttgatttgaaccagtaagaatttatatccttataaagctataagccagtggcaagaaattctgtgtaatttagagaaagattcattcttcttaaggcaacacttggctatttcaatttcagaattatattatatataaagttgaataattttatttttaaagcagtttgtacaaatctttacattccaccagaggaataagcttctttaatggcatattagacagtttaggaactatattaaacctttaaagctctgaggtcacatgttactaggttcatttcctgataccaagcctcagttgtgagcttcaagccttacggagcagcttactcacactgatgagcattttgaatttaggccacacacacacaaaaaaggcccacagatctaagctcctgacaaaatataacagtctacctacatcccaggcaaaagtttctgagagacccatagctaataaggttataactttgttctgtgttgctcttcattcaaggcataattcaatccgaagacaactcaacttgtcaaacccggacttcaatatccagcagcttcaaaaacaggaacagttgactggaattggtagaattaaaccagagttatataagcagaggtcattggataatgatgacgggagacggagtaacagcaaggcttgtgggaaactgaacttcattttaaaatatgactgtgacttagagcagctcatagtgaagattcacaaagctgtcaatttgcccgccaaggacttttctgggacttcagatccttatgtcaagatctatttgcttcctgatcggaaaacaaaacaccagactaaagttcacagaaagaccctgaaccctgtgtttgatgaagtgtttttatttccggttccctacaatgaccttgaagcacggaagcttcacttctctgtgtacgactttgacaggttctctcgtcatgacttaatcggccaagtggtggtggatcacttcctagacttggctgatttccccagggagtgcatcctttggaaggatatcgaatatgtcaccaatgtgagtccagcatttcttcatttttgtggtggggggcatcttggttagcaaggaaacagattacttacacattatcttgaggacaaagtgtaaaattcctgtcaatgtacatgtagcagttatttcagaacctccttgtaccttttcagaaacagggttttaacaatattgattttgaagtttccaagcattattccatgaaaacaatattaaagaataacattctctcttttctactttcagattcttagctagcccctaagagacagcaggtgttatctgtcctccgtaccacattttctttagagctttttcaggttgtttgtgctgaatggaacctggcattctattaactgtagtctgcagctaagagaccattacctgactctgacagcagtaggtacttacctgtcttctgaggttggctcaagagcatttcccatgattggatcctcagcttcaaccctaccagtgggagtggttgagaagagttggcaacacatttttaaatgtaaaactcacaaaatccaagttacaaggagggaagtctgaaaagaaactatagataatggcaaaactaatctatcgacagtcacatccaatttagggctcaggagagaagtcaaaggtgctatgtagtggtaccatacgtctatgtctacattttaaacacaagatttcagaggtgatatttctactccatttatatccttttcattatcctgcagaggtgtgttggcattccagaaatagaaaggaaaattgaacattcttaggtaactctgatattttaaagccacttgtttctttcacctgtccaaattccctgagataactttgttagctcctcttcctggatatgagctattctgaggccagcgtagctctctttctctgccatggcatccaaatggaccaagcaccaccgtctttattcagctcagacactgattcagcttgagtctggagcctatttagtgaaagactaatctctgcctaatgaccaaatacctgcaccagtaccctcttatcctcagccacttttatgaactagggactcacccatgctctgattgccctgtgggacaccttctctccacatgccacagggttccagtgccaactttgtgctgctatccaaataaacaaaatgtagcatgggagtctgctggcctttatcataatcatgaggaaagaaagaaaggagttggagctggataaggtgcagagaatagcagttgatgaaaccaaggtgatttgggatactggggaaggaataggtctctttatcttaaaagataataatacacataaacccaacaatggatgctggggaaagcaaggcttgtctcccaaatcccaactgacaaaatcaggaagcaacatgagaaggtttaaagaaacaaaatgggaaggctgcttatacaaagatacgaatggctcaggcatcaccccccactggggtatttactaagtctccctggttatgggagctgagacactgccagctgcagtgaggtgccttgaacttaagtctcatctcaggtatggtagggaggtgttggtcacaccatctaatgagacatcaatttatactttttgacaaatggattccataaaatagctggagaggttattagaaagttcaacgaggatcttgctgagagttgcctttagagactttgtggtgagagcaacgttgactgcgcagtggctgatacaaatctggataaggctgatgatccctggtgggaacgactcctaggacaggttcctgtggaacaagaatatggagtggcaggtgatggagaccttctggccctgagatcactgccatttcagcattctcttgggagtaagagtttcttttccattgttggaaaatcctggatttccatagggttaaggagaatgtgaaattatttatcagggaggaaaaccaataaagctacaggcttcagatttctcagttgtttcctcaggcaaacaataaatcttctgagcattgatctaagcctttggatggccacgggagagggtaggtcctgtcaatggaattacaggctatttcatagtctgccatattattacattccattttaaaaaatgttatttggggttgtggggtttttttttgtatagagactgaacataaagagctgagatttgccatgattctctttttataatatagaatgtatataatatagtaaatataataaatggattaatgaaggaaaaattaaatgaacaggcctgaacccaccatttagttgaagaatagaacattacttctattgacccttgaattgtcctctattgcattccctctcagtccagtcctgccaagagaaaaccactatctttaattttacttatatcatcatataaaaaatatatatgcatatacatatgacaatatgggtttgggttttgtctattttggcattttattgctcttctttgactagctttttttctttggtcaacattgattatggcatttagtaatagaaataagcagagcagctgtggcttatgtatcttcattgctatataatattccattgtattaatattaatatatgacaaatttgcattcttgtactgatgacattcaggatgttagtttttctgtgattctgaataatatcgcagagattttgtacacatcttttggttcacatatgcaatcatttctctagagtttatccctgatagaggtaaggtatacatgtgttcagcttttctagataatgacagtctttttcagtcatttgcacgtatcacaaattgatccttccactgttgaaatgtgatgatccctagtgttccactttctctccaactcttgcagttgccacactgatcaatgtatgtgtgtgcatgtatgcaaaatgatatattattggcatttcttcagttgtccggtttgaccatctcttgatatgtttattggtcattcatgttttctttcttgtgaaaattcttgttcagcacttattcttttgttttcctttccttgttgattcacataggctttttaagcagttgggatgcaaatcccttgttggttatgtgttttacaaacatcatctctcagtttatggctgtctttgtattcactttatggtgtctttgataaatagaggttatgtttggtgtaataaaatgtatcaggattttctgttgtaaattagcgcatttgtgtcctacttaagaagtacttccttaccctatgtcaggaaagatatttctcctatgctttctattagaagtgttaaggttttgtcttcctcaattatgattttaatccatctagaatggaaatgtttacatagtgttatataggcatcatatatcagtcaacttgggctgccataacaaaataccataaactgggcaacttaaacaatagatatttatttcttagagttctggagcctgggatatccaagaccaagtttcagcagactccattcctggtgaggctctcttcctggctcaccttctcactgtgccctcatgtgacagagagagggagagagctctggttctagtctctcttcctcttcttataaggacactaatcctacaatgggggccccaccctcatgacctcatgtaaacctgattacctcccaaaagcttcatttccaaatactgtcacaatcacactggggattagggtttcaatatataaattgggagggacaaaaacattcagtccataacatatccatatttatttttctatatgggcaaaaaattttctggcatattttcccaataatatgcactgtatgctctgtcctatgtagatttctgtatatgcacaacctgtttctggattctcttttctatccactgggatgtttaactatctctatgaatagcacaatttgcaaattactattgttctatgataagccttaacatctggaagggcaaatcatccagcctacctctatcttagttcaaccttggctggtacttgacttttctcacacattttagaatcacattgccaagttaaacaccctctctggtatttggatttgtatgaagtctattgattaattcatgaaaattttatatcttttgtgatattgagtctttctacacgtgaccatagtatatctctccatttacttattcttttacttatttcttctttaaagttttttattcaaagcctataattttctacgttaagatcttgcatgtctcttgttagatttattgctaggtacattactttttgttcttttaaatgttatcttctctaaaatttcattttctaactattgctagtgtatagttaaaattctttatgttaatatatcttctatttggcagtcttgtagaactcattaatgcctttttttttttatggcattttgctcttgtcacccaggctggagtgcaatggcgcaatcaaggctcactgcaacctctgccttcagggttcaagtgattctcctgcctcggcctcctgagtagctggaattacgggcgcccactaccacgtctggctaatttttgtatttttagtggagacggggtttcaccatgttggccaggctggtctcaaactcctaacctcagtggatctgccggccttggcttcccaaagtgctgggatttcagtcatgagccaccgcgcccagccttagctatgtatattttgtggatatattcatattaagaatgttttactctattcagagttgagtaagcctttttatcacacgtaattgttttatcgtatgctataatccagtgaggttttttttactcctttaatctgctattttggtcaattacattgattgattttctaattttgagccaatcttatattcctagaatgatccacactgatcttgatatagtacattttctttacactgctgagttcagtttgataatatttcatttagcattttatttcttctgtgctcatgagtgatgcatgtaatatgctgtcttgtactgtccttgtctggcttggaatcgaggtaattcttgctttataaagttagtttggggcattattttggatgcctgctatttgttcctgctcagtgtccctgaaggctttggggtttttgtgtatctttcttcaaactggaagaatgcccctagtttctgacttctccttaggttcagacaatgagaaagggaggagagtggggtcaggatattcattcccctatttcttctttttttttttcttttcttctttttcttttttttttttttttttttttgagactgagtcttgctttgtcgcccagggctatttcttgaggtatctgtaggctggcaataactttcaactgaaagccacaactctggaatatgcctttattttgcttttattcttaaaagattgtctgggaataacaatttgggagcacaaaactgagttactttgattttgccattataaaactatcatttcattgtcttctgacctccaattgtttttgagaagttgacatttggtctaatatatattcctttgtataggaataaaaccgtaattaccacagaccccataacactagctcagtggtaatttgggtatgaatgttttaaatgcataacaatgcgaattgtcagtattaagtcaaatgcagctagaaacagtagttttcttatggtagtgcaagtttgtattaatggttagaaactggctgaggggacttttgtttcttttttacacaaagcaagtctaagacaggcatgatgttggggataatatctgtttaataagcaggggagaagttctgtgttgtttatcctttaacgatgtgactctcaggctctgcagtcctctgaatgccagaagctaagccaccagagactcacatttacctccattcaagctccagctgcagagtttacttacctctgtggattaatgctttcttgttgtttctgtccactgaaaaattctctttctggtccgtcagctctgctacacattaagaagaattttttaatctagtatttttacctgaaggagtttctgtgagtattcaaacctattgcaagaaacactgctatatggctcaaagcttatttttaaaaagccattttgcttatactaactgagtagtaatctgtgtattatatatttgtctttcaattgagtagaactttagaggtccttcaatctagcagataaagctgagatgaatggccattaggacattcagctgaggttacatagctgaataatagccaaatcaaaattaagaccaagttttttaaataatcatttcagtctgtgcaggaaaaggtggctcaaaatgatcatatacactggtttacttctccttcccctctttacctggctaactcccactaagctcttaaatcccagcttatgtgccatttcctcagagaactctttttctgagccctggactagtgtaggtttttctggcatttgtttccatgacactctgtatttctatcattactcatgcttcttttgtgtatttgttcaattttctttctataagtgcaaaacccacatttggtttgcttcctgctgggtgctcaacctctagaatggtgtctgaaagttagatatttaataagcacttgctgcataaagtgaaactccttatgagggactaatttgttgagtctctagggactgcttgagttggaggctgttatgcagaactgaactcataaactaatcttttttaaaaaattctttgtttctccaaggagagtgtgagttttataaatgttggcactcaaataaaaattaatcctcatgctttcctatgaaagaacaaaacggcaattattgagtgtaaaaatgatggtgtaattaaacctctcaactactgaagccagatcaataatagtacaatacatctttgtgaggattttatcagtcagcaagagagaagacagcatcaagggggaaggtcaaaatttcggagactatgagtccagtgttctgggttaatgttgtctgtcaggacgatcctcttggcatttttagtataccccacttactagtggctttctgaaaaagtaggcattaagcacttcaggaatctctttcttggtggttggcttagaaactggttcggagactgtctctgggagctatgatcacctcagttagactctgatttggagaagatgccacagttctcatgtaatgacagtagaagtaatgaatttccctctatgccaatacagattccagttcagaagaggcaaggacacagtttacaacagcatagactttcttttaatgttaagaacttaaaactcttatttcagcaaggtttgttattttgtagtgactgatttggagactttcctgttctgtctcccaaaggcctgaggccactcgcagacctgatggaggtggacacctggaaccacccaggcagggggaatataagtattcagggaagtccagagtgcttgctcttcatagtcgaatacaaatggggcaggcaggctctgtgattgaagatatttattaatttgaatcccttttcatttcattgtaccataagtcatatgtgattattatattgatgcaacacaagtgagccccaaaactggggcttagcccaggagagttcttggcttcacccaggaaataattcaagggcaactcagtaatgtttgacagcagtcttttattgaacagtactgctccatgcagagcaggggtaactcataggcagtgtgcccagagtcagcaatgtatgagctgttggcaactgaatatatacccagttatacccacttccaattacatacaaattaaagggcgggttaatgcaaatagaggggtgggttatttaggactttctaggaaagggtcagtaacttctgagtcattgccatggaaaggtggtaacttctgggttgttgccatggcatttgtaaactgtcatggtgctggtaggagtgtatgatgtaaatgagcaatgagggcaactagggatcactttccttgctatctgctggctcttgctggttccttcacttcatcccagtgggaaataagtcctgcttgtgtcctacctccgtatgattttaaggttgtgttacattcggtggtgtcctggtagatgcttaacaactcgttgtggggcagggatgggggaaggaaggggacctgattttagcatttggtgattcctgggttgtaaatactcccagcagggctgatttcaagttgccaatgtgacatcactgaaagcagagttggcaagagatgctcacccacaattgactccccaggctgctgccagcttataggagccagctccaggacaccactacacgtagtgctgaaaatgcaaaaaggaccggctgcttaactgatcctaagggacaagcaactcgaaaaacaccacagaaagccatggtttccagctgccaagagggaagccaggttccttctataatgtgggtgaagtctggataccactagggtctactgagctgtatctttatgagagtccactgaatctcaccctatcatttttcccacttgtgatccctcagacatgttatccccttgatgtctagattattcagagggagtgaaaagtggcagcactgtagaacagcacaactgaaggaagggattgatgaagctacaggtctctgacgaagagactttaatagcttttattctagtgagggtgccaggacaaagtgtttggtttttttaataaaatatataccatcaagatatgaaccaccaatatattagccaatatgtaaacatcagtcagtccagaatttagctgaagaaagagaacattatcagtctctttgaagcttcctatgtgccgctcctccaaatccccctaagagattatctgtatactgaattttatatgtataattccctgtttttaaaaatcattttaccacttaagaataggctattcagttttgcctattgttgaaatttatgtgaaagatactatattgtgtttgttcttctgcaaactgttatgttcaatattatgtgtattaaaataatttatgttcatgtacataactagttcttttttgttgttttgcagcatgattttagcattccatattatatggtctacaacaatttatctttcttctgtcaatggttatttgaattaattttaagtttttttctatttcagaaaatgctgctattaatctttcttgtatgtgtctcctggtaaatacatgcaggaatttctgtaaagtatatacctaggaatggagttgctaggttgaagtaaattgtatctctaagaagtttgaccacttacaatcccactagcagtatttgagaccatcttagactatgttctctctaacacttggacttgctatacactataattctaataatttgaccacagattcttttgagttttgtacattcacaataatactatgcatgaataaggacaattttgtttcttctttcttttttaattattttgcttgctctccctacctcatcttttttgcttgttttattacatttattacaatcaccaatacaaatgccagtggagtaaaccttggtttgtttctgttcttgaaaaaaatgctttgattattcatcactaagtaggacattggctatagactttttgaaaacctgaatggatattgaattttatcagttgattttctgtatctattgagagaatcatgtgttttgttccttttatcttttaaagtaataaattatattgctatattttatactttttatgaaaacttgtatttctgagataaatccaacttgttcacaatgtgttgcttttttatatacatggatatacatgaatgtgtgtgtgtatgcgtgtgtgtgttcagctatttggtttgctaatattttaaaaattttgtgactaaacttgtgagtgagatcaaactgtgatttttttttctctcttaatctgcattttattattaaaggtgtacaagccttaaaaatgagttatggcacattatctcttttcctagtctcttaaagattttgtgtcattttgtgtatgattgaaataatcttttctgtcaatgtttagtagaactttctagtataactttctgggtcagatatttactttaggggaaattaattcaatttatttgatgattataataccaaattattttttatttcattgagaattgattttggtgatttagatttttctagaaatttgcttatttcatctatgttttgaatgtattgtcttaaagttcttcataattttttcttcttatttctgccttatttctggttatgtccttattctcatttctaatatagattatttatccctgttcactttctcattgatcagtgtcactggagtttatcagtcttattggccttttcaaataaccaacttttaattctattaattctatttaatttttgttttccattatttttcctgtatgattttctttcttttttctttagtctattcagttgatatttttaataattacttatatctttaggttagtaatttgcagtcttttaaaaacttttttaaaatatgcatttaagactataaatttcccttgaagtagtgctttagctttatgtttgcaaattttgatatttagtgttttcatttttatttttatctaagcatcttctagcatcaaatatgagtttttctttggtctatatattgtttaaaggtgtgtttttaaaatttcatattgcatagtttttttaagcattatttctgtaacttaattaaaaatgtgattggataatatggagtgtattttatagattatttgatatctgttcaaatttgctttatgttctcttacacatcagtttttataaatgtgctaggtgctcttgaaaagattatgtctcactcatatctacatcttgaataatatttttcctcagtctaatatatcagttattgataaaatgtgtttttcatctcctactatgatggtggattttcaatttcatctttagttctatcaaaatttctgcttaatgtatatatgtaaaaatatgatattagtactttttatatatgtctggtcttttcaacattttgttattatttagtgtctctatatagagaaatgctttttaggccttcaagtgttctttggcatttataaagtttaaaaatttttcttccaattctgtgaagaaagtcattggtagcttgatggggatggcattgaatctgtaaattaccttgggcagtatggccattttcacgatattgattcttcctacccatgagcatggaatgttcttccatttgtttgtatcctcttttatttccttgagcagtggtttgtagttctccttgaagaggtccttcacatcccttgtaagttggattcctaggtattttattctctttgaagcaattgtgaatgggagttcactcatgatttggctctctgtttgtctgttgttggtgtataggaatgcttgtgatttttgtatattgattttgtatcctgagactttgctgaagttgcttatcagcttaaggagattttgggctgagacgatggggttttctagatatacaatcatgtcgtctgcaaacagggacaatttgacttcctcttttcctaattgaataccctttatttccttctcctgcctgattgccctggccagaacttccaacactatgttgaataggagcggtgagagagggcatctctgtcttgtgccagttttcaaagggaatgcttccagtttttgcccattcagtatgatattggctgtgggtttgtcatagatagctcttattattttgaaatacgtcccatcaatacctaatttattgagagtttttagcatgaagggttgttgaattttgtcaaaggctttttctgcatctattgagataatcatgtggtttttgtccttggctctgtttatatgctggattacatttattgatttgtgtatattgaaccagccttgcatcccagggatgaagcccacttgatcatggtggataagctttttgatgtgctgctggattcattttgccagtattttattgaggatttttgcatcaatgttcatcaaggatattggtctaaaattctcttttttggttgtgtctctgcccggctttggtatcagaatgatgctggcctcataaaatgagttagggaggattccctctttttctattgattggaatagtttcagaaggaatggtaccagttcctccttgtacctttgatagaattcggctgtgaatccatctggtcctggactctttttggttggtaaactattgattattgccacaatttcagctcctgttattggtctattcagagattcaacttcttcctggtttagtcttgggagagtgtatgtgttgaggaatgtatccattttttctagattttctagtttatttgcgtagaggtgtttgtagtattctctgatggtagtttgtatttctgtgggatcggtggtgatatcccctttatcattttttattgtgcctatttgattcttctctctttttttctttattagtcttgctagcggtctatcaattttgttgatcctttgaattggaaaaaactactttaaagttcatatggaaccaaaaaagagcccgcatcgccaagtcaatcctaagccaaaagaacaaagctggaggcatcacactacctgacttcaaactatactacaaggctacagtaaccaaaacagcatggtactggtaccaaaacagagatatagatcaatggaacagaacagagccctcagaaataacgccacatacctacaactatctgatctttgacaaacctgacaaaaacaagcaatggggaaaggattccctatttaataaatggtgctgggaaaactggctagccatatgtagaaagctgaaactggatcccttccttacaccttatacaaaaatcaattcaagatggattaaagatttaaacgttagacctaaaaccataaaaaccctagaagaaaacctaggcattaccattcaggacataggcgtgggcaaggacttcatgtccaaaacaccaaaagcaatggcaaccaaagccaaaattgacaaatgggatctaattaaactaaagagcttctgcacagcaaaagaaactaccatcagagtgaacaggcaacctacaacatgggagaaaattttcgcaacctactcatctgacaaagggctaatatccagaatctacaatgaactcaaacaaatttacaagaaaaaaacaaacaaccccatccaaaagtgggtgaaggacatgaacagacacttctcaaaagaagacatttatgcagccaaaaaacacatgaaaaaatgctcatcatcactggccatcagagaaatgcaaatcaaaaccactatgagatatcatctcacaccagttagaatggcaatcattaaaaagtcaggaaacaacaggtgctggagaggatgtggagaaataggaacacttttacactgttggtgggactgtaaactagttcaaccattgtggaagtcagtgtggcgattcctcagggatctagaactagaaataccatttgacccagccatcccattactgggtatatacccaaaggactataaatcatgctgctataaagacacatgcacacgtatgtttattgcggcattattcacaatagcaaagacttggaaccaacccaaatgtccaacaatgatagactggattaagaaaatgtggcacatatacaccatggaatactatgcagccataaaaaatgatgagttcatgtcctttgtagggacatggatgaaattggaaaccatcattctcagtaaactatcgcaagaacaaaaaaccaaacaccgcatattctcactcataggtgggaattgaacaatgagatcacatggacacaggaaggggaatatcacactctggggactgtggtggggaggggggaggggggagggatagcattgggagatatacctaatgctagatgacgagttagtgggtgcagcgcaccagcatggcacatgtatacatatgtaactaacctgcacaatgtgcacatgtaccctaaaacttaaagtataattaaaaataataataataataataataattttaaaaaaaatttttcttttagttttgtcttgtatatttctatttttttaacttacaaatttcctacatccttatattttaagtgtaaatgttgtaagcaaagtatagctggattttttttaaatccattctgaaaatcattgacttctaacaagtgagattagtatatttatgtcattgtgattataaatacatgtggatttatttctaccattttacatcatttaaattctaatttttaaatatttttcttcttttaaattgttttgaccccattttactttctcccttctaccaacttataagatacaacctctgtttttacttgtttagtactttcctagaaattacaatatgcgttgttaatttaataaagtaaaaagttaatcagtgtattaaacctccgtcaaaactatatttttactttgggacctttgactccagttacctccattccagatgacataactattattttctgatattttactcctatcttgccgtggttttctacactcagcaatttgacattataattaatgttttataaagccaatgattgtttaaatttaccacatatttaccacttctcttggtttactatttcttcagactttccttctagattattttttatgtttagtacatttttgagaaattccttcagttaaagatctgttgatgttagccctctcagtttttacttgtttggaaatgttaccatttcacattaataactgaaaaaaacataggtatgcaaatcttgtgtggataattttttttctcagtatctattcttttagaatcttgcctccaaactcctggttttgagaaatcaaccgctctctatgtgtaacactcttttctctgtgccatacttcgagacttctctgaaatttgattatagtatgaatggtgttgaatttttaaaaattattgtttatctttcttaggattcatagggtgtcaggaatctgatgtgtctcatcaattctgaaaattcacagccatgatctctttgcatattgtctctccctgatgctttctatcttttcctcctggaaatctctttagatattttagacctattcactctatcttccatgtttgtttgtttattctttttcctattgatagtgcagctgggtaatttctttacatctgtttttgagtacgctaattctttctttagcagtttccaattagtacttaataatttcttgaatttctcatttaaattgatgtaattttcattcctagaagctttgactcttaaaactttgttcatttgtataattatttgatccattttcatacttttgacatctttttagttctttaaacttctctgctcatatagtattttcagtcagataattataaaatatatgactcgacgtcacttctgcatttgagacaaaaggaaagtggcaaggaaagaaggcagtgataagtacctctagggactctttttcatctggaaaaagaaagcagtcctaaaagtcatcccaatgtctccgcttatttcttattggacaaagctctgtcacaaaaccatcctcacactcaagaaaagtaatgaaagcatatttttagctttttcagcctgtatgctggaaagtggccagatgaaggggttagaaatgtaatttaagttagctgtggcatttgccccagtagcacagaaggagatgctcaggaaccttttattgaatctgagtctgaaatgcaccatctcatttagtcacactgggtccacaaaagggaggacagggaagaaagctgagaaagcatgccagctctgttgggattcctgtgaacatgtgtggaggtgattccacagctcaaagaagataacaggggatagcgatatttttctctataaaaatctatccttgttttccttattttgggtggaatttgaaaaagggtaaatttataagagaaattaaaacatgcttatttaaaaaaaaactctccatgaacctatatgtgaatgttcatagcagctttactcataattgacaaaaactggaaacaacctaaatgtcctccaatgggtaaaacaataaactattacatacatacaatggaatgctactcagcaatgaaaggaatactcaatgtgtgcataatatacacacaatagcatggatggatatcaggggtataatgctaagtgaaaaaaagcaagactcaaaaatctacgtactgcatattttccttatatgaaagaggcaaaattatagggatggagaacaaatcaacatttgccagggcttggggatggggagatgcgttgatgacaaaggggcaatatgagggaattgaggggttgggaggaggtgaaactgcaaatcaaagataaataaaaatttaaaaatcactttttgaggaggaaaataaagaattaaatgagaaaaatctaatgaaaagagtgaccgtcgagtttgaagatacaggaatatataaaatatttctgtctatctaggaagatatagaatagataagaataatcaatagagcaagttctctgagaagttagccaacaggatctaaactataggtgtagaggttgactttagataaacaaggggacaatattttcttttgagatggagtttccctcttgttccccaggctggagggcagtggtgtgatcttggctcactgcaacctttgcctcccgggttcaagcgattctcctgcctcagcctcctgagtagctgggaatacaggtgcccaccactacacctggctaatttttgtatttttagtagagacagggtttcaccatgttggccaggctggtcttgaactcctgacctcaagcaatacaggtgtccaccaccatgcccagctaatttttgtatttttagtagagatggggtttcatcatgttggccaggctggtctcgaactcctgactcaagtgatccactctcctcagcctcccaaagtactgggattacaggcgtgagccacagcacccagctggggacaatattttctttgttataggaattaataggaaaaagatgagagcaaattcaggtaaatttgtagatttggagaagtgtaaagataaaacattaaaaaatgtgcaaaagggatagcagggattttttatattgaggaccaataccagtcaactggtggtagctgactaatgtattgtgttaggaaggatttacaagcaatatcaaggatcaggaaatgagaagactaggatctagtggcaatgtctgccacaagttttagacaaccaattaccttctattatttcagctaattctctctaattgtatgtattgtaagaaatcacacacacattctctacctataataaccttacttttccacttctctttgtttaactaaaggctattcacaagccgaggaatttgagactagcctgggcaacatggtgaaaccccgtttctaccaaaaaaaaatatgtaatagtacaaaaattagccagacatggtggcgggtgcctatagtcccacctacttggagggctgaggtgggagcatcacctaagcccagggaggtcaaggctgcaatgaaccatgattgtgccactgcgctccagcctgggggacagagtgacaccctgtctgaaataaaagctatttacattaggagtcctcattaagcaacccctctatatatgcacccggaatagatgagatgcttcttgtgtgctcttcaagcatcctatatgtccctcttcaccacagttaccacattagattgtaagtatctatgtatctctgcctaccacactagaatagttgatccttgaagaggaagtctgtaactatattcctattatttaacctaagaggtggatagtaaaattatttttgagtgcacaggtgaatgaaggaaactaaaatagctccaatatggcgtgtgaatcttaatttggaattcctggaagcagaagctgagagggattctcgtgcaagtgacttagtgaaggactgccctcaagtgaaacccataaagaagaaagggaggcaggtgggtgaagggagagagcgaggcaaaggtgtatcagctaaagcctttcctgagcctgatgccacaaggagctctggagcgtgaagagcaccactgaggtatcccaccctgagacgagggggccgccgttttaccctgtgctagtctttcatgggctgtaggactcctctgggaaagggtataacttgcctgtcattttcaagatggttcccatcagctgaggagaattttcccaagaaatatagagccatgaactgttcgcagccaatgctcatagccgctaaggaatggatgcactggctttgtcaaaggggatgtaggcagggaacaatagggtctattgcagtgtgacaggacaatgggaaaggggttatgggaacataggtgggaccctgactcccatgacctctgagatataggaaaaggaaggagaaagagaagagggatcctcttcccctcacctcccaccccacatactcctttcctaggtgagagttggcttgctgccttggcgttgtggctaccaaagacaggtgtctgcacagcaggctggatgctcctgagaggcaggttggctttgcagagagctgaggtggacttttgctgcatccccttcacacagttaaattattccatggctgaacacatggggagggttgagctagatgaaaaaaacaaatcttctacaaacctggaacagctgtaaaagaaatagagttgtcaaggtcagcaatttcatctctgaagaaaggtgagaccagtaagggagaacattcccctgggactacatttaatggtcttctacctatggaagtattactatccaaaatagtgatccagtttcctgacagaaagccttgtcccatggattggcatttgcttgcttggaaaatgagttttcaacctttcgagaatcgaaacagtttgtggtatttacaatacagccttactgtccagtagctaagtgtagtctaattctaacagatggctctccagggaaattttccttcagattggattatgcttccaggctgaaattcactaattaaggggagtctaaataaacatagtgggggagtgagagggaggggaaggtaggctgtttcttaggaagctgttttggaaagtggccatatttgcaatctttatctttccagctccacacactcagctatgtggagaatctaggccactgctttgctaaagacatggtagtgctggatcaagggtcagtctgccttcagcaaggagctatgacttcgttttctataaggccctggctctctaacctggttttctcctatgttacctgtcttgaaatgtagcttccagaataaatgtatctttaagatgagcatgactgactttaaaaactgaacagatctatgaatttggctctggtaaacattgctaaccttcttttataaaaagtctaatactttggttttgaagtctttaatatgtaaagatactcctctattacacatttcttaatgcttaccagtttgagacctaaatagctataggacaagtacatatggctatcagatatggaaggatgaattttgcatgagtgggctgagaaaaatccaatttgcaagtcaggaagtgagttctgggtcaggaagttagttgcagttttgtctccatcatcattcaacaaatgtttttgaatactcactgtctgccaggcaatgtattggacatcaagcacataatggcccttaccctcttggggcttttggttttgggagatggaaatgtgggaagaagggacagatagtgaaacataacattgcacagataattactcacatgtgttattggtgctgcagaggaaacgtaggcaagcgcttcctgtggcacctaacctggcctggtatattaaagaaggatgcttggaggaaataacattgaagctgagacaaaaggatagttaggcatttgcctgaagaagggcagagtcccacgcaaaaggaacaggaatgtggaaaggccccaagacaggaacagttttggcaagttcaggggacaaaaagtgcagggtggttaaagatagggaaataaaatggaagagagaccagaactcaggaaggagcaagaataattaagatttttaagacaagaataagtctttgagtctttatgagtaattttgggcagtgaattgacacatagaaatttacttttttaaaaaatcactctggctgcagtgaggaatggacaggaggggagagtgaggggatggtcaatctattatagaaggccactcgcgtgtggttaatagacatggagaaaagtagcagattccagaaattatttaagcagtttcactgaggaataattgtatgtaattaactgcatatgtttaaagcacacaatttgacagtatttgacatatatatacatttgtgaaaccatttaccatagtcaatcaaaataatgaacgtatctgtcacctcaaaaccttgcctgtacccctttgtaacctctcctgcctccactccctgccacccatccccccaatccccaggcaggtgttgatctgttttgtcacactacattagtttagattttctaggattttatagaaataagcatcatacagaaggtactccgcttttacttctttcaatcagaataattatttttgagattaattcatgttgtatgtattaataattcaatctttttattgctgagtactattccattgcatagatatgccactttttgtttatcccttgcctattaatgaacatttgggttattttcagtttgagatattacaagtaaagctgccatgaacattcatgtgctttgtatggacatatgcttttacttctctcacataatgacctaggaatagactgctggattagatggtaggtgtatgtctaccttttgatgaaattgctaaactgtttaccaaaatgattgtatcattttacatttacaccagctatgaactgtgaaagttctagttgctctacattctcaccagcacttggtagagttggtctttcattttagacattctaagaggtatgaaatagaatctcattgtgatttttacatttccctaataacaaatgaaattgagcatcatttcatgtgcttatctaccatctatttatcttttttgataaactgtacaaaatctttggtcaatttttaatagtgttctttaactttcattttaggtttagtggtacatctgtaggtttgctatataggtaaacacatgtcataggagttcgttgtacagattatttcttcacctgggtactaggcctagtacccaataattattttttctgatcctttccctcctcccaccctccacccccagaaggttccagtgtttgctgttcccctctttgtgtccatgtgttctcatcatttagctcctacttgtaagtgagaacatgtggtatttggttttctgttcctgtgttagtttgcaaaggataatgacctttagctccattcatgttcctccagagaacatgatctcattcttttttatggatgcatagtagtccatggaatattttttatggctgcatagtattctgtggtatatatgtaccacattttctttatccaatctgccgttgatgggcatttaggttgattccatgtcttgctattgtgaatagtgctgcaacgaatatacacatgcatgtgtctttatgctagaacaatttatattcctctgggtatacacccagtaatgagattgctaggtcaaatggtagttctgtttttagctcattatcgccacactgctttccacgatggttgaactaatttacactcccaccaacagcatataagcattctcttttctccataaccttgccagcgtctgttattttttgactttttagtagtagccattctgactggcatgagatggtatctcattggcgttttcatttgcatttctctaatgatcactgatactgagctctttttcatatttttgttggtcacgtatctgtcttcagaaaaatgtctattcatgtcccttgcccactttttaatagggttgtttgtttttctcttgaaaatttgtttacattccttataaatgctggatattagacctttgttagatgcatagtttgcaaggattttctcctgttctgtagtttgtttgtttactctgttgatagtttcttttgttgtgcagaagctcttaagtttatttagatcccatttgtcaattttagctttagttgcagttgcttttggcatcttcatcattaaatatttgccatttctatgtccagaatggtattgcctaggttgtattccaggatttttatagttttggggtttacatttaaatctttaatccatcttgagttaatttttgtatatggtgtaaggaaggggtctagtttcgatcatcttcatatggctagcaagttatcccagcaccatttattgaataggcagtcttttccccattgcttgttttttctcagctttgtcaaaaatcagatagttataggtatgtggccttatttctgggctctctattctattccacaggtctatgcatctgtttttgtaccagtatcatgctgtttcaattactgtagccctgtagtaacagggtaacatgttgaggttggggaatgtgatacctccagctttgttctttttgcttagaattgccctggctattcgagctctttttggttccatatgaattttaaaatagtttctgctagttatgtaaagaatgtcattggtagtttaataggaatagcattggatctttaaattgctttgggcagtgtggccattgtaatattgattcttctgatccatgagcacggaatgtttttccatttgtttgtgtcatctctgatttctttgagcagtattttgtaattctcactgtagacatctttacctccctggttagctgtatccctaggtattttattctttttgtgacaattgtgaatgggattgcattcctgatttggctctcggcttggctgttgctggtgtgtaggaatgttagtgatttttatatgttgatttttgtatcctgaaaatttgctgaagttgtttctcagcttaaggagctttggggccaaaaagatggatttttttaggtataggttcatgttgtctgcaacccgagatagtctgacttcctctcttcctatttggatgtgctttatttctttctctgcctgattgctctttctctgcttgattgctctgatcaggactaccaatgctatgttgaatagaagtggtgagaaagggtattcatgtcttgtgccagttttcaagggaatgcttccagtttttatccattcagtattatgttgcctgtgggtttgtcatagatggatcttattattttgaagtatgttccttcaaggcctagtttattaagaatttttaacataaagaggtattgaattttatcaaaagccttttctgcatctattgagataatcatgtggcttttgtctttaattctgtttatgtgattaatcacatttattgatttgtgtatgttgaaccaaccttgcatcccagggataaagcctacttgattgtggtggattaactttttgatgtgctgctggatttggtttgctagcattttgttgaggatttttgcatcagtgttcatcaaggatattggcctgaggttttcttattttgtgtgtctgccaggctttgatatcaggatgatgctggcatcacagaataagctggggaggattccctcctccacagttttttagaatagcttcagtaggaattgcaccagctcttctttgtacatctggtagaattcggctatgaatctctctgtccctgcacttgttttggttggtaggttatttattcttgtttcaatttcagagcttgttactggcctgttaagggattctgtttcttcctggttcagtcttgggaggatgtatgtgtccagggacttatctatctcttctaggtttttaaatgtgtgtgcgtagaggtgtttgtagtagtctctgatggttgtttgtatttctgtggcatctgtggttacatctcctttgtcatttctaattgatattgtctcttttcttctttattaatctaactagtgacctatctattattattagctttttcaaagaacaagctcctggattcattgatcttttgaatgatttttcatgtctcaatattcttcagttcagctctgattttcatttcttgtcttctgctagtttagagttgcttcactcttgcttctatagttcttttagttgtgatgttgggttgttaatttgatacctttctagctttttgatgtgtgtgtttagtgctgtgtatttccctcttaacactaccttaactatgtaccagaaattctgttatgttgtgtctttgttctcattagtatcaaagaacttcttgatttctgccttaatttcattatttaccccaaagtcattcaggagcaggtggtttaatttccatgtaattgcatggttttgggtgattttttgtctcgatttctatttttattgtgctatgatctgagagtgtgtttagtatgattttggttgttttgcatttgctaaggattgttttatgtctgatcgtgtgctcgatttgagtatgtgccatgtagtgatgagaagaatatatattctgtttttgagtggagagttctgtagatgtatatcaggtccatttggtccaatattgagttcaggttctgaatatctttgttaatttcctgcctcagtgatctgttgaataatggcagtggggtgtttaagtctcccactattattgtgtgagagtataagtatttttgtaggtctcttaagaatttgctttatgaatctgggtgctcctgtgttggatgcatatatatttagaataattaggtcttgttaaattgaactctttaccaatatgtaatgaccttctttgggctttttttgtttgtttgatctttgttgttttaaagtctgtttttatctgaagttaggattgcaactcctgcttttttctgatttccattttctaggtagattttcctccatccctttattttgaggctataggtctcattgcatgtggaatgggtctcttgaagacagcatgtccttgggtcatgctttttttatccagcgtgccattctgtgccttttaaatggggcacgtaatccatttacattcaaggttaatattgatatatgtgcatttgatcctgtcattgtgttgatagctggttgttacgccagcttgtttgtgtggttgcattttagtgtccctggtctgtgtacttaagtatgtttttgcactgactgctaacagcctttcctttctatatttagtgttcctttcaagatcttttgtaaggcaggtctggtgataacagactcccttagcatttgcttgtcggaaaaggatcttatttctcctttactagggaagcttagtttggttggatatgaaattcctggttgaagatttttttttccttaagaactttgaatataggccccctaatctcttctggttcgtagagtttctgctgagaagtctgttgttagtctgatggtgttccctttgtaggtgaccagtcctttctctctagctgcctttagcattctttctttcatttcaaccttggaaaatctgatgattatgcatcttggagatgatcttcttgcgtagaatcttgcagggattttctgtgttttctgaatttgactgttggcctctctaagaaggttggggaagttttcatggacaatatcctgaaatatgttttccaagttgtttgctttctcctcatacctttcaggaatgacaatgattaatagatttggcctgtttacataatcccatatttctcagaggttttgtttgttccttttcattgtttttttctttatttttgtctgactgccttatttcaaaaagccagtctaaaagttctgagattccttccttagcttggtctgttctgctgttaatacttgcaattgtattgtgaaattcttgtaatgtgttttgcagctctatcaggtcagttaggttctcttttatattggctattttttctatcagctcctgaataattatattgtgattcttagttttcttgagatgagtttgccattctcctaaattttaacaatccttgttcctatccatattctgaattctatttctgtcatttcagacaactaagctttgtaacaaacccttgttaaagaactagtgcagacatttggaggatataagacactctgactattggagttgttggagttcttgtgctggttctttctcatctctgcatgtgggtattcttttaactgctgggctgcttctgattgaagtggtcaggcaggagcagggttattgtgctagagtctgagatcaggcagccctaaccagtgaggataagtgaggaccaggacctgtatggagaacaatccagtcacttttctgtgaggtaggtgttctgtactggaggtctggacaagcccctggtgcctgcagactctctagagcctggagacagcaagggtgatggctgcaagacagcaaagatggtaatccacccttcccactgggagttctgtcccaggcaattgcagagctattactggctcagtagccccagtggggaatagtggagtcttaggccaggaggccacatccagtgaggagatacaggattagggagccacataacaaacactctggctactttttcacagggctgctgcagtgtgctgggggtctgctccagttcctactcaccttggattttctagcacctgaaagtatcaacagtgaaggttgtgaaacagcaaagatgatggtctgtccctacctctgggagctctgtctcagggaagtttgaagctgttactagctggaaaacaccagcagaggtgcttgtagaccttggctgggagattctacccagtgaagagaaatgggatccaggacctgcatgaaaatgcagtcttcctgcttcttcagagagctgctgtgctgtactggaggactgctccagtctctacacacctcggactcctttgagttggaaaacattaatcttgtgtttaggcacaggatgtaagggctactggaagatgcttctgatatgcgttggctgtgtccccacctaaatctcatcttgaaatgtagctcccacaatccccatgtgttgtgggaggaacctggtgggaggtaattgaatcataagggtggatttttcccatgctgttctcatgatagtgaataagtctcatgagatctaatggttttataaagggcagttcccctgcacacgttctcttacctgctgccatgtaagacatgcttttgctcctctttcaccttctgccatgattgtgaggcctcctcagccatatggaactgaatccattaaacctctttttctttataaattacccagtcttagatatttcttcatagcagtatgaaaatggactaagacagcggccatgagactgagttggttttatgaagcagaggagtcaagtttaaatcacatatatgattacatatgtgtaatcatactgtgtgtaatcatactgatatgactcacatctcagtcatatttgcaagaagcagtcagtctttgtattatttcattttcatgctgctgataaagacatacccaagactgggtaatttataaagaaaatggtttaatggactcatagttccacgtggttggcaagacctcacaatcatggtggaaggcaaaaggcatggctttatggcaagagggaatgagagccaagtgaaaggggaaaccccttataaaaacatcagatctcatgcaacttattcactgccatgagaacagtataaggaaaactgcccccatgattcaattatctcccaccaggtccctcccccagcatgtggaaattatgggagcgacaattcaagatgagatttgagaggggacacagagccaaatcatatcattccacccctgggcctctcccaaatctcatgtcctcacatttcaaaaccaatcatgccttccccaaagtcccccaaagtcttaaatcattttagcattaactcaaaagttcatagtccaaagactcatctgagacaaggcaagtcccttccacctatgagcctgtaaaatcaaaagcaagttagttacttcctagatacaatggaggtacaggcattggataaatacacgcattccaaatgggagaaattggccaaaacaaaggggctaaagaccccatgggagtctgaaatccagcagagcagtcaaatcttaaagctccaatatgatatcctgtctcatatccatgtctcatatccaggtcacactaatgcaagaggtaggttcccatggtcttgggcagctctgcccctgtggctttgcagggtacagcctccctcccggctgctttcgtgggctggcattaagtgtctgcagcctttccaggtgcacagtgcaagctgtaggtggatctaccattctggggtctcgaggacagtgaccctcttctcacagctccagtaggcagtgccccagtggggactctgtgtgggggcttcaacaccacatttcccttccacactgccctagcagaggttctccatgagggccctgcccctgcagcacaatctgcctggacatccaggcatttccatacaacctctgaaatctagacagaggttcccaaatctcaattctttacttctgtgcacccacaggctcaacactatgtggaagttgccaaggcttggggattgcactctttaaagccacagcccaagctgtaccttgaccccttttagccatggctagtgcatctgggatgtagggcaccaagtctttaggctgcacatggtaggggtacactggacctagcccacagacccattttttatcctaggcctctaggcctgtgatgggaggggctgctgcaagggtctctgacatgtcctggagacattttccccattcttttggtgattaacatttggctccttgtgacttatgcaaatttctacagcaggcttgaatttctccttagaaaatgggtttttcttttctattgcatggtcaggctgcaaattttccaaacttttatgctgtgtttcccttttaaaactgaatacttttagcagcacccgagtcacctcttgaatgctttgctgcttagtaattttttctgccagataccctaaatcatctcccttaagttcaaagttccataaatctctaaaatgggggaaaatgttgccagtctctttgctaaaacatagcaaaagtcacttttacttcagttcccaacaaattcctcatcttcatctgagaccacctcagcctggatttaatggtccattatcagcattttggtcaaagccattcaacaaatctctaggaagttccaactttcccacattttcctgtcttctttgagccctccaaactgttccaacctctgcccgttacccagttccaaagtcacttccacattttcatgtattattacagcagtgccccactcccagtaccaatttactgtattagttcgttttcacactgttgataaagacatatccaagactgggtaattcataaagaaaaagaggtttaatggactcacagttccacatggctggggaggcctcacaatcatggtggaaggtaaaaggcatgtcttacatggtggcaggcaagacagaatgagagccaagcgaaaggggaaacccattataaaaacgtcatatctcatgagacttattcactaccacaagaacagtatgctggaaactgccctcatgattcaattatctcccaccaggtccctctcacaacacatgggaattatgggagctacaattcaagatgagatttgggtggggcacagccaaaccacatcagtctttatggcagaagaggggaagagaagctttccattgtgaacacttccacacttgattatttccttcttctttggcacattcctcattaatttccaccaggaggaggcatgcagcccagttcccctagtctctcttcctaaatcccccatctttttttttcgtttttattattgagttgtgagagcttttaaaatattctggatgccagtcctttatcaaatatatggtatgtgaatattttctcccaagctatggctttttattctcttaacactttcttttgaaagagagacattcttaattctgctcaagtccatttactcaatttcatcttttatagggtatgttttcagtggcgtgtcaaagaagtcctggcctaatccaaatttatacagtatttttttttactgttttactctagaagttctatcattttagctcttgcatttataactacaatccattttgagttaatttttatgtatagtatgatatggtttgaagttctttcttgtgaatgcatatgtgtgtgtatactataaagttgttccagcaccatttgttgaaaagtctatattttatccacacaattgtcttttgcacctttgaagaaaataattgatcatatatatgagtctattctggactctctattcttttccatcgctctatttgtctagctttactccaatatcacagtgtcttgattgcagatttataaatcttgaaatcaaatagtgtaagtgctgcaactttaccctactttgtcaaagttgttttagttatctaggtcttttgcatttccatatgaattttataatcagctcattattttacacacacacacacacacacacacacacacacacttgaatttttattggggttgcattaaatatagaatcactttctattatttggaaataataggaatcttaaaaatagtgagtcttcccatcacaaacagtgtatctctctccatttagtacatcgtctttaccttccctcagcaatattttctaagacaggtctctcgagctctctcattgtttatcgttctcttctctggtactctaccctgcaaattctaggggggatggcctctccagactcccaagtccgtttcctcaactgagggagcccactaggctctgcctgggttttcacctgtctgtactgtgtctctgaaactttctccaggtggtgacatgggcagttttagttcttgcctcatttgtttcctgtcactcaaggatcacatatcttcattacctgatgtccaatcattgtttcatatattttgtccagatttttagttgtttaaaatgtgagagtaaattcatttcctgcctctctgtcattgtcagaagtgattgattttatgtgagaattgaagaaagagagtggtcaaagatggatgattttctggttttcagcatgagcaaactccagatgttggtatttactgagatgggaaatattaggtgaagaataggctgtattctggtataagtaagatcatgtgttccatttttaacatattcagtttgtgctacctgtgagacattcaagtataaaaaaatcaaaaaacagttgtatagactaggctggagctcagaagcagggcctgagttggaaatatgaattaacaaattgtcaacatatcctgtttatggtatttgaaaaatagatgttgacaaaggtctttactagcagaatgtagagtgataaaagaggaggacagaggtccagtttttgaagaatactaatgtttagacttcagatggaaaagaagaccttaatctgagcagagagagccaaagaggtaaaaggaaaactggttgattgtatcatggaagtcactagaagaatgtttcaaggaaccaagagtggtcagagtcactctgactgagagagtgacaaagctacattgaagttgatgaagaaaggactgaaaagaacccactggattatgtgacggcaaagtcattggtggctttagtaagggaactttccatagagcagtaaggaccaaagccagaacagagtagactggaaagcaaatgacaggaacaggaggcagcatgtttaaatagctccgtggcacatttggctgcaaaagggaagaggaggactgaaattgggaaggaatttttcaaaatgggagaaaacagattatttaaatactgacagctaagagccagtagtggggaagcctggagatgcaagaaagagaggatgagcagcagagggggttcctgtggctgagaccccatcggatggcacgaatggatgggacccagaacagagttggcggatttgcttttgataaaactcttcttcccatgttgcagtgggagggagaggccaatgcaagtgcaaatacatttatgaatccaaaggtaagaagtcaagtgtagcccttctgatgtctctgtcttctctgggagggaagaaacagggctgtgtactgagcatatggaagagcctctgccttcagggagcttgtggtcttttggcgtgtactgctctgatgatttcttttatagtaactacaaaatcagtctcacttcaacttgcgtcccttttaaattttaaaatgttttacttttcaaaaataatttgctggattttccttgattatgtaatctgtctgctcaatacagaaaacttgaatgaaaacagaagagtagataattctgatacaaagtcacctatagtccctctgccctaaagtaaccactgttaaagtttgatatatctttcctgtataatctctgtccatggttcttcacttgcaatttttatatggttgtgacactattttgcctgcttctttgctgtaatttgtttaagtaaggaaactaaacacaaagttttgtctcaaaggaccatttctgcaggtgggtggggcccctgttcctgaacagggcttcattccctttgtccatgtttgctgagatcagggcttccctgctagccaggcatccctgaacaagccaaaatgcagagcacagccttcaaaggaagcttgtctgtcttctctctttggaggctgaggggtcacagtcagcgtacccagaagagaagctgggacttatcaattaaccaatactgctttcaaaccgttttcatcaaaatattttttttttttgagatgaagtctcacgcttgtcccccaggctggagtgcgatggcacgatctcagctcactgcaacctctgcctcccaggttcaagcgactctcttgcctcagcctcccaagtagctgggattatgggcaactgccactgtacccggctaattttttttgtatttttagtggagacggggttctaccatgttggccaggctggtctcgaactcctgacctcaggcgatccacccacctcagcctcccaaagtgctgggattagagatgtgagccactgcgcccagccgaactatttccatcaaagcatggggaagtttcatatgcagcttcagggatcttggggctggcagctgtcaaataagcatgctgtgggaactggggagtcaggaagattgtggatatgtgcttctacttgtgcctagaggaaaaggtttcctcttgtttcacaacagccttggccagcagctttttgagggagtgggaagcaggacaaggaattttggtgtctgccagattgagacagggatcaagaactgagtgaggacagagcgtgaaagagtggtctcaggcctcctgaagcatttgttctttcaacagacaggctccgtgctagcactagaatgcccatggaaactgaaggaggaaaccacaggctggcagaaggctaagtctgtggcatcagagcaggaagcaattccgtgaaacagcgactctgctctagctacatttatttccctctgttcctggaggagtgaggggaagggggagacatccttttctaacaagggactttcctgaatacttggattttatattaattcatgctttcagaatttaaaggaactctttctgcacagagggagtcccccatcaggtcatgcaatgtttaacaattatggtttggccacattctcctagaaaaactacaggacctcccccttcaaagacatatacaactccaggaagccacctgaaaatcttgtgttggtccctgtaccaactctacccccctcctcagtctctattaatctgttcccaaaaagaaatgtcaccagatggccctgcaaatgtcacctggccatcagcatggcttcactcaaaacagggaggcattagagaatctaatccatcgttcatttccatcatttcgggtcagtttgcatcctttactgggcatatagtgctttcttaacacactgggttggacagtaagatctgtaatcctgctgatattaaagaatattgcttcacgtttaatggaggaaggtcccagtgactcacagatactgaacattctgtaagaactcctctcttgttagcatttaataccagattttactgccctcagcttcatgaactgagcactccctcagcattctcaatgcctcaggctatctttagcatttaatcccttccaggtatcagagccatcagacctcctttttttttttttttttttttttttttttgtattttcaaagtgcggatgggtggattttaggaattgagctgatccctttttaaaatgggtttttcttttactgtctcttagatttcatatccagtcatgggcatcagacccgtatcctgtctctgctctgtgtatttctccattctagcagttacagaaatagctgagggaggtgtgactggttctggagaaagaaaagaaagctgaactcctcacgctgaggaggttgcagggccacagctaggcgggctgggggtgggaagatggctgtactgctgggctgtcaggcagaggggccacacatccagatgtgcttttgagctccccgcagcttttagggagtggcttccaaatgagtcataaaactcagaggtaggtttggaataggagatttcaagtgggctcctgctcactgtcagagccacttactctctttactggggattaaagaactccacgagcattgccggggactggggggaggggaaattgtttaatggatacagagtgtctagttggggtgatgccagcattctggaatagacagtagagatggttgcacaacactgtgaatgtacttaatagccactgaactgtatacttacacatggttaaaatgataaattttatgatgtacattttaccacaataaaaaatatacaaacacacacacacacacacacacacaccatgaaaactctctaccagagtgcaaataagacttggagacaacagagaaaggcgcaggcccaaatgcacagagttgcccctgcctccagccagttgaggtgggctgcgggcaggggtcatgttcctacaggggccacctactcatcttagcagagactccatacagcaagggctgggtttccctcagcttcccagagcccaggcctatcaccctaccaacgtctgtcccaacaaatccatgcacattgcctatatgccagaccccagttctagtgtgttttccacttaattttcacagaagtgaaatagctattatgcccatatgacagaataggaaaatgaggtatagaagggttcattactcgcctaaggccacacaagtgataaaggtgagatagcatttaaatgtaagtctatttgaagcctgtgttccaaaactcagttttcccgattatactacacttcaaaatatccatcttggtaaaaaaataggtcctgaacaatgcttccatcaactctagaataaaaatgagtttgtatcatgatttgaatccagtacacttcagagacactggcattctgctgctttcatcacactccaccctgtgagtcactcatgccagggggggacccaccgaggatgcctcatgggtcaatatagtttttgctgaatagatgatacatcagaggctgaataaggatcaggctggccggacagatttccagagaactaatcaataaagggtactaaaacattgaggtggaggaacctattaatctgtataactttctagaagaacattacatatggttggaaataatacctgaagaagtgatgacattcccaaatagctcaagttgcagtagatgctcactaatatgtcttctgaaggtgtaggtccaggcaaatgcaggcttcaggcttgagctatttgggtggtaaaggaaagactagcactgtctccaacaaccctctttgtctacccatcagagcagccaacttctcataaacactgaacagatatttaaataacatcagtttgaagaatggccaaagtcacctcctacctgagctgcctacgtgcattgatctgtcctgcaggccacaagtttttatcccctctttcctatgtctcagcctacttctgcctcatagatacacacctcaaaatgcagccctggggcctgggctcactttccttcatcttccatatctcaaggcttatgttagagctcattctcttttctttcaggtccaatctcttctcctctcaatgcccactgccacagctccttctttggtgactggcattgctattgccaccaccaccaactttcaacctgagagcatgatttttccagaagacgtgatgtagaaagagagagaaaataaatgctacttgcattttgacactatctaaaagcaaacagataaatgtttagctttaaaaacatttctaaatgtgtaaaacaattatttatagtggattcttgaccctgatcccattgctcactctcaacctatgtgtgagggatggtcacttatggagtgagattaggcgtgaagtaagtatcagggtaacaaaaccagtgattttttaaatgatgtcatgattttgtcttaaaaaaagtcaagatcaaagcggccagctaataaagtcctggtcctacataaataactagggttttaaaaaattatctttaatgatttttttaacctccttgaaaaagatgaagtggtatatattgcctgtttcttaatggttaagtatcatgaactttggtggggaaagaaactgaaagcccagtaattccctcggtctttatataagaagagtattatctgaatgtcgtttggggcagtggttatatttttaagcatctgtcattcatgctaattgaccagggatgtggctagccagggtcaagctcccacagtcagtgcaagagggccctgaggctttgggcagcctgtccgatggcagccacctaatgtaggatgcagtggcagtgctggcccacttttgagagcagccgctgagttacggactccttgtgtgggagctgtatgtcggactggagctccagactgctcattccctgcccagagccttaccctgtcatcattgattttatggggaaagaaagcatctccttttgtaaacaccacaccagcatcttcaataagatgatgcaatgggattaatgatgcactttccagcatcctcatcgattctgaagatggaagtagaaacttgagatgagactaagccatgttttgtcaacattttgcttctctagcaagcaaaatatcctcaaattgtgagtttacttgaaagatatgctggtatttgaatccccagggctgggaagattctattttacagacatcaccaggagtgtgacactcaggcctgagagtaaggagaaaggaaggaaaaattaatgagtaaccaaccactctatttcagagtctgttgtatgggtgagctggtggtgattggcttgcaaatgtgttttccaggaaaaaaaactctacaggagtggtgggaacaggatgggagtgggagggcacagagggaccaacagaccttccttttctttgcaggtctaggtctgaggatggcccagatggtgagcaattgtgtggctatttagtcaaatcccaactagctcagcagataactgaacatccctgaggggcttgggaaatatatgtgtttgtgaagtgctgtgagaatttacccagtgtagctcaatctgcctcagactgacttctgacataaatgaattttaagaaagtaggcgttttccttcttgaagaagcataaactcatattaggttagaatctcaggagtttgtattcagttgatgtctaggcacatcagagatggagaggagataaatgtctctccagcaaagccgctgggtttgcacacctgtccccaatatctacactgggcttgacagagggtttatgtagactagtcagaaagttgtgcagcagatattcaatactgaaatcaacgaatgcactttattactcacttgcctactatccctggatgacaataagacctagatctacagtttaaagttcagaaatatatgatgcttctcgatggttatgatctgaataacagaagtgaagcgttaaggtaaatattgatgttatttaagaatactcagtgaactaacaggtctctgatgactgtgtaatttatgcctagccccgtgaagaatagtacaaaataatatgacatgtgctcccctgcacttgttatggaagatgagacacacctatgaaaagctgaagtagcaacacagagcaggatgcatacaaacatgtgaaatacacagagattactgtgagctaggaagacgagaaaggcatcaaagagtaagccatttggtactggtccctgaaggtcttgactgcgtgcagtgatcttaaaagtggggtgtgagatgacatacactagggtgcaagaataaaatagtaggacttctatttatattttctcatctttgttatttctcttttgtatgtttattacacacataatgttagaattctatacacgtataaaacttgtaagtaagtaaatatacatatatggggtatgtgccccccaattttttgatgtgcatgtgccagttacaaagttattttctttcagcttcaaattcacccttcattttctgctctggaaaagtcaagttgggacctttaaatatatttccttttaccacccagaacaatgttaagctctgtcagcagagggcacaggagaggcattgcaagaggaacggggtttttttcttcctagctctggtgtcctcccctgaggcttctgcagggaggcacacttcctccagcccccaggaaccactttcctgcaatatgggcagcagcttcagtgcaaggctccacaacacccatggcctctccggcactcagcccctgcagcatatagcaatcagcagcacccagtgggcagcagcttccccaggaacccccttggcgagacaccttcccatgaacagcttttcctagcacctagatggcagatttccggtaagttctactggtgcagtaccacattgacttctctgccattcagtgagtgatggctgtgccctctccaacaaggtctgtgtttcagccttgagggcagggaggatctcttccttgagtgctctgctcctcatatctgctaatcctatagtttttagagttcattgtacttcttgctagccaatccttcattagttcgatcctctgttatagtatttatttatattaagctttccctgtttgaattactggatggtttctctcctgaatgggtccggactgattcactgcacttctattcataaaaaattttgagcatgcactgactgccagtatatgtatattttcttgtttatcaattatattcatgtattatttgactagttttcatgaacacattaaaaacatacacaaaattttactaagataaagatgaaatattgtatatttgaaatattgtctttgaactatcttgattgtaatggctttatactacaattagcaaatatctgaagtaacaatatgaaccaaatatggtgaatcattaatagtaatgattgaaatttaaattacatttcaaataatgatttgattggaattaaaagagggtacctgtgtccatctttatgttcactttgagtagactttattttatttttaaaataacaaacttcagagcaccacattgcacacctctggggcatatgaatcctctttggacacaactgatctaagctacccccttgtctcctttctggtccatcacctatactccagccatagtgatccacataaaaatcacatcactcacttgcttagagcacttcattggctcaccatcagtcttatgataaagtatgaaacttatctatagacaattctgagtgggcttaggccatggtgaatgtgatggtccaaatcctggcagaaccaacatctgtttttttctctagtcttgtcacctaccctcgcttgcctcacaaacaggcctgaggtagggaacatacactgagggatgctgcaccagggcttttcctgttgaaacccaggccctgaggcttggacttccttcctttaatctgacatgtgacccctcctcagttctgaaaagctcctaagtagattgagtaattccaggttctactttcccatgctgtctgctgattgtgtgcttctctgttctttctacagcataatgcactgctacttcattgcaagaagcttcttatgtactgggcccaacttgatgctttacagtttgttcttaggctggaagtgtcagcttttggagtgcaggggcagttgaaatatatctgtcatctaacttggcactatcaccttcccaagcacagtgatattgcctttcacacagtgatggcattgcctctcaggaatactctcccaggctacccctccacagatgctatggtaccatttctccctatgcctcagtttctcctaaagatattaacacctgaatttacctatgaagttgttaaaaaaaatgaattatggcttggactagtacctgtaatagagaagggattttcgatacacattaattattatttcttcaaggtcgacaaccaagataaaagtacgtttccataggttttctccctgcaactcttctcacacacttctacacctgactccaccagaaatctgaaaaaggcagaatgctctttcctgctatcggactcctagatgggagtttcccagcaggcacaagtgccagctgcaggacacaggtgtgccactaatgacctacaggtatgctgagatacaaatttcccctcagctttgtgggaggccaggtgggctctctttaccccctagccttaccttctcacctggtggggttaccccagtgtgcaccagatgtggcttcctgtgtttaccacaacacaaaatattagggaaatgctgttggaattaccttaacactcttctcctagtatctcttctgttgatctttctggcctcaactcaaatctcaccttctccttaaatcctttcctgccttcctcagctagaaggaacaaaagcatgtatgtgatgcaggttaccccaccttcttccataagcttctactgcagttattgtctgatccattgagtagacagttaaacaaatactcagctactgtccttgagacatcacttatatgctattgcgaagtgaaagagaaggattggcagtgggattgatggaactcaccttagagatcatctggtcaaatgatatatagacagaaaggaagtcttatcaaggttaagtggaacttgttcaatgtcacctggagctggaattggaggtccacgattctaataactgatccacagttgtactgcttgcatttctcatgctgtgtctttgctcccaaatataccaggagctcattggtggcccagtcccttcctgattgtcttgtgtctaccacagtgagcctggcccagggccttgcacaaagttggagctcatgagatgtttcctatatgaatctaattggtcacactcaagcattttcctttgctttcatttgggaatcaatcctaaatcattccaaagggatgatagtttcttttctgctcatgatctgtttcaggtctaggatgatacaactgataatgtatttgagcctgtccaggagctgagattggtcactgtagttacagtcaaaaaacggtgatgatcccatcaaaggatggaagaagcagttccaagaagctaattggaaagactgatgagtctaccatttgtgctttcaaacttgagtcgttttactagttctcaaaatttaatttcaataccttctttgaaatgcggacattcagcatccacattgtcccttgggtgaaatgactactcctgtatttcagtgttctaaattatgagcaattaacatcaaggctgtagccttagcaacctgtgcctggcttgggggctttgccccttctgctggttctgttttcttcctcccaaccttcctttgactccctgcagtgcgagccctccagggagggaagaaggaggagaagacaccctgctgcacattacttttctgtactccactgatgctcctttccttttgtgatttaataacttaaacatctgacttgagaacattggagatagtaacaaaagccactttttgaaccttatgagtcctttggagacaactgtcacattttacagtagatgcaattaaaagtaattttgatcatcagtaatagaagcttcacttacaggttctattatttggaatatagttattttttatttcacttttttctagtcatattgtaacattaaacatgcaaatttatgcattctacaattctacactaaactgttactgtgtgccaggcactgcactgctatgttccaggttccctaccttcatggtgtttcagctaggagaatggtggaccgtaagcaaatgattacacagattgttatttaattaaaatagtgagaagtaatgcaagaaaaaatacaagatactcaaggaacctgaaccaaaggggtaaaatctggtatgaagagtcagggaaagttttcccaaagaactagcatttatggtgaggctaaggtgtgaatagaaagtaccagaagaagaggatcaaagagaagttgttcaaagagaatttcgtgatgaaaaatcaagccatgttaagtatttgagatttttttcccctaaaccaccatggaaacctaccgaaggatttttaggaggaaagtgatatgatcctatttgcatctaaaaaataaccctttacctattatgtaaaaaagacagtgtcttgggaaattgtcaaggactatgttaatatcatcttaccttgatagaatagcaaaagagagccaatatctggtgtttggaaaaatataatacaaataaagcataagacaaaaataatattaattttacactggtcttcaaaaccagtgtgggtattactaaatgtctcctcaaagatggtaatgcagatgaaccgatagtaattgggccccagcttctctgagagaatcctaaagatagcaaagcagtgtgaagtaagcttccatatatgcatttgtttttctctgggcattcttttttgttccatcagtttatattccatcaattgcatcaatataatactaattatattagtaattgttgaacctgctaccatgaatcacctctcactcaactcccagcacaaatttcctactcaactttcctctcctccctcttacatggattgattattcttagcccttcattattcccttagaattttagaatcaggttatccagctctatgaaaaccaatgtaaccatttttattttaaaaactgcattgcatttatatattaattcgactagaatttacatctttataatattgactttatctatagacataatttatttctccattgatttaagtgctcattaagtcattcaaaaatatttattgagccataatatgtgccagaaattattctagaaactgttaagcagcggagaataaaagcagaaaaaacactggcttttaggactttatactctaaaaaagtataaaagtgggagaaacaaataattacaaaaaatatacatgttaagaggtgatgagtactgcgaagacgaaaatggtatagaaagggttaaagaacgacgaatactgttttatagaggggtcataataatggtcttcttaaaatcataagtttttttagatttatttatcagtacaatatagttttagatgctagcatagacattgtcttcttttaaagttatggtttttttggctggtgaataaaaatgctattggtttttgaaaattgattttatatccaggaaatttttatatttggttattaaattagtttgcagattctcataacgattgtcattttcaacgtaacacaatttttcttcctttttaatcttccagctgattattatttttcttaagtagggcactgttaggtcctcctgtacaatattctacagaaatggggcaagcaagtattcttgtcttgttcttaaagggatggttctagtgtttcatcattaagaatgatgtctttggtgaatgtttgatggacatattttatcagattaaagattcatagcttgcaaaatatatttctcatgaatgagtgttaaattttcatgtttttagaaaacctaatgagaagataatattgttttacattttccatttccatcatgctatgtggtggaatacattattagattgtctaatgttaagtcatccttgaatgctggtaataaaccctactttgtcatgatttattatttttttccatatattgcttcattttccctgcttctaatttcttcagatttttttttattatactttgagttttagggtacatgtgcacaatgtgcaggttaattacatatgtatacatgtgctatgctggtgcgctgcacccactaacttgtcatctagcattaggtatatctcccaatgctattcctcccccctcccctcaccccacaacagtccccagagtgtgatgttccccttcctgtgtccatatgttctcattgttcaattcccacctatgagtgagaatatgcagtgtttggttttttgttcttgcgatagtttactgagaatgatgatttccaatttcatccatgtccctacaaaggacatgaactcatcattttttatggctgcatagtattccatggtgtatatgtgccacattttcttaatccagtctatcattgttggacatttgggttggttccaagtctttgctattgtgaatagtgccgcaataaacatacgtgtgcatgtgtctttatagcagcatgatttatagtcatttgggtatatacccagtaatgggatggctgggtcaaatggtatttctagttctagatccctgaggaatcgccacactgacttccacaatggttgaactagtttacagtcccaccaacagtgtaaaagtgttcctatttctccacatcctctccagcacctgttgtttcctgactttttaatgattgccattctaactggtgtgagatggtatctcatagtggttttgatttgcatttctctgatggccagtgatggtgagcattttttcatgtgttttttggctgcataaatgtcttcttttgagaagtgtctgttcacgtccttcacccacttttggatggggttgtttgtttttttcttgtaaatttgtttgagttcattgtagattctggatattagccctttgtcagatgagtaggttgcgaaaattttctcccattttgtaggttgcctgttcactctgatggtagtttcttttgctgtgcagaagctctttagtttaattagatctgatttgtcaattttggcttttgttaccattgcttttggtgttttagacatgaagtccttgcccatgcctatgtcctgaatggtaatgcctaggttttcttctagggtttttatggttttaggtctaacatgtaagtctttaatccatcttgaattgatttttgtataaggtgtaaggaagggatccagtttcagctttttacatatggctagccagttttcccagcaccatttattaaatagggaatcctttccccattgcttgtttttgtcaggtttgtcaaagatcagatagttgtaggtatgtggcgttatttctgagggctctgttctgctccattgatctatgtctctgttttggtaccagtaccatgctgttttggttactgtagacttgtagtatagtttgaagtcaggtagtgtgatgcctccagctttgttcttttggcttaggattgacttggcattgcgggctcttttttggttccataagaactttaaagtagttttttccaattctgggaagaaagtcattggtagcttgatggggatggcattgaatgtataaattaccttgggcagtatggccattttcacgatattgattcttcctactcatgagcatggaatgttcttccatttgtttgtatcctctttaatttcattgagcagtggtttgtagttctccttgaagaggtccttcacgtcccttgtaaggtggattcctaggtattttattctctttgaagcaattgtgaatgggagttcactcatgatttggctctcatttcttcagatttttatagctttattcataaaggcaattggcctataattttcctctctcctactgttcatgttgttatgatatcaaagttacactagcttcataaaatgaattggaaaaattcctttttaaaatctttcctctggaaaatttgtataagatattgtctccttgaagattatcttagagggctttttgaggtgggttttaaataactgatttgattgatctaatagttataattttttcaagttatctattcttgattctgacgttggtaactggtttttttctagtcaattttccatttcattaagttttcaaatttcttggcataaagttggtcatagtattctctaacatttctaaaagttcctaaaatacacatagttatggcttttcatttctaacattttttatctcttttttcttgattctttttatcaaggaaataactaattttaaaatcagcttttggtattatattttttctttattttttctatttcctcccttacttctattttgttttgacttttgctttttgttgcagtttgtcttttttccaactttttgatgtggtctttcattgcatcttgtgggtcatcagttctgagtagcttctaattctcataataatcactgttttaactgttatttaaaagtgtgtttttgaacttccaaatctgtggacttgtttgacattttgtctttgacttatagtgaattttggtcgtagaacattgtctgaagaataccagttatttggattaacagagacttactttgtagccttgtatatagtcaacttttataactattccatgattccttaaaaaaattattctctcctgttgttgaattcatggttccatatgtgttccctagatcaaacccttttgttaattgtgttgttcaaataatcgatattattatatattttgtctgcttgggttatcatttacagaagtgtgttttactttccctctatgattgtgaatttgttgattgctctttctggcaaatatatgctggttcagggtcattatatcttcctggcaaattgttccttatattattatgttggctggaaatgagatcagctgcatgttgtggaaaatcaactagagtggcttagtaaaagaattacatttttctcaagaaataagaaatttagtagtagctcaggactggtcatgctcttcaagttagttttcaaagactcatatccttctaatttcctattccaccactcttgcaatttcattttcaaatttatggtcactgaaaagctcctcttcctccagtatcaacttggcattacacataagaaggtggtagaaggttgaagggcaaaagccctatgctagctaaaactatcaggaaataattacatcaggaaaataatagctttccccaaagtaccatccagtagttttcttttcttctctttttttctttttctttctttctttcttttttattttattttattttttttttatttttttttgagatggagtctccctctgtcacccaggctggagtgcggtggtgtgatctcggcttactgcaacctccacctcctgggttcaagtgattctcctgcctcagcctcctgagaagctggggctacaggcctgcaccaccatgcctggctaatttttgtatttttaggtttcacaatgttggccagactgatctcaaactcctggcctcaagtgatccttctgcattggcctcccaaagggctgggattgcaggcctgaaccaccgtgaccagccccagtagttttccacctatatatttgtgtccagaaatggtcactgatcatccttgatgcaaaagagtctagaaaaatgaatatttttaactgggcccatgggtgccccaaacccaattgaaattccattagtcaggaagaagggaaattgaagaatgttaggctgaaaaattggtagggtatgccatagttgctttaacctgaataatgtttttcaccttgaagaccatgctttccaacattatatgaacttttggttagtacttatcgcatatatatatatttcattgctttcaacattaatgtgttatatcttagaagtgtctgttgtaaataacatagaactagattttaaaatccaatcagtttcatcttttaattgaagatgtaaccatttacatatatcgccatgactgatatatatggatttatttctcccattttatgattttttgctttctagttaatatgttaaatttttgtctcttttatctttcttcttgccatttattggccttttttttttttttttttttttttttttggccatcgtgtctttctttcatcagttatgtcaggaacttgggacagctccattatacctttcttttgctcttctcaaacattccatgagtcaccagtgtctgtaaatctcattttgcacatttaccttgaatctccactagtactatctgggcccaagatactatcatttctctgctaatttttttttcataactttcttattggtgtcctggaatctactcttgctgctactacagaatgacttcactggactagctagagaagttagtgggaaaacaactagcctacattttcctcaacttacccacattgtccaattaaattgagtacttttaacaccaagacctcatgaaaggaaaatgatgtgctcagctttctgacattagcatctaggtaaatggcaatactagtaccgaaatgtagaataccagaaatgaaacatatttagagtggaacatcatgaattcagttttgtgcatagtgaatgtaaggtgtctgtacactatccaaggagtgacgctggtataggctgttagataaatgggcttgaaacttaaagataaatctttacattgaacatattgaaggcttgggaaaggatccttttagatgggtgaagagaaagcagtgcctggtcccaagccctgaaaacttcttacatttaaaggtccaatgaagtagaagcttccgcaaaggaaattgaaaagataaagtcaaaaaggagaggcaagagaatctaacatcatggaatccaggagtaatgagtgttttcacaaggagggagtgatcatttataacagataccactgagaagatgagaatggagaggtgtctgttcagcaacataggggcacattggtgacagcaatttaggtagagcccttggtgcctgtcccagatagaagtgagctgaggaacaagtcaaagatatggaattagagttatttcttttaaataggcttttagagaaatttggccagataagctaagaaaatgacaagcagtagctgggagagggccatgctttcaaggaagaggtttatttaaaaatatagagtatatgtttaaatattaatacagagaattcagtgggaaagaaaagactgaagaatgaggacagcaaagataatccactgagtttctgagaaagcttagtggggtggggtattcatcctacttgataggatgagaagcaacattgaaagaggcataaagatgcaaaaaagaatctcccaacattggaagaaggataaagatgcaaacctctttgtagtgatgttggcagcgagttaaggcagtttctgtctaatgatttttgttttctacatgaagtcagaagcaaagtcattttctgatgatgaataaaggtcagagctttaagaagaaatagtaggcctggtcaatcaatacatagctacattttgttaaatttctagtgttagggacatatttctaatgcccaccaaaaaatccaataatgtgattattttcattctatagataaagaaacaaatgttaaataacttacccaaactcatatggctggggtgtatgccatgcagatggcagagctgggactgaaccccagatttgtttgactttaaaactgacactaatttgaaaaattaaaagagtatgacaaagacaaattatctcctccagtttttcactggctagttggaaattctctgctgtctcttcattggccttattacagttcatgtggatatttaagatcgttttgtgacccagttgaaaactctaacctgcctgagcagaattagttgtcttcaatggttgcatttatttctgataaatgcaaagcatcactaggactaaaatagaatttggggtcagattccttcatggctggggagctctgcagctgtgacagatggatgagggagcaaatgctagagggaaaaaggaaagaaaaaagaatctgtcctaaactgaacctttgttcagacagttaagacttgcctcccagacaggttttatggattgctaggggtctcaatttgtgccctgatgtgtctgagtgagtgtgattttcaggcatccagacccctcctcccaggcccaccccgcacatattctgccttcacttccttgcacagtgaaacgctccattgactgcaaggcttatgaaatgaaaggctctgataatggagtgtaagcatttttgtcttcatgattgtggaaaaaaaaaagcgatgaaattactaagaaatcctcaagatggggtggggaaatgggaacaaatgattcgttgggaaaataaatgcttcagtctaaaaaaatccaagatggaataaaagatgtattcccctcccaatttatagaggagagcaattttttggtattttctcagccgaaaggaagaaaaccttaaatttcttcttttctgtctttatgagtctaaactatttttaagactttagagtacatcaggttctgatatcgtgtgcattttgtttctttaactgtagttggtattttatatggacttctgagcaaactgaattggaattctgcaaggtcaggggactgtttcgtttgtctttgctcaccacgaagcctaacacctcctgccatgcctgacattgtataggtgacaatttttaaaaaaataaatgaatgaattagcgaattaaactttcttctcagagtattttcaccaacagttttcactggcctctggttctcattactttctctttactggcattttcaggggatttcatacctgttttaattttgctttttctagttgctgtagttattgttttagttaccaaaaatgacttaaaattgtgaaatatgtgagcaggatcgggtcgtatttactgttgaaatgtatcaggcttctcccttccaatcctgctctagccacaatctgtaaggtcagtactatgccacactggtggcccttgggcctctaatttgggacactgatactgatctctgacccctgttctgctgatgtaccctatagccttgtaattgcccttgaagaaagtcctacttgctttggttacttacccttcaaggtactgaaatgtgactgtggcccagctgtcctccaggtgctcccatctgaccacatgactctccaatcctggctcccatgattcgttgctgctcagtcatgaggacatgttgacacctcatcttggtctctctatggctagcaatttctctaagctctgacatacctgggttttgggccttcttctgcaaatggatcactctctcatacagactattattctaacctcccgaattcccaggtcctggcccctttctacctatgcagtcttaatctaacaatctgctaatatgttggtgtatgtacttgaggatttttttcaatacttagacataaacataactatgcacacttattttcgataaacctgaggtcactctatgcatacttctttgtaatctgatgtttttctcttaataaaactcttaatagagttaattaatagacatccacactaattaatggacatccacatctattatagacatccatattaattaatagacatccacattaattaatagacatccacatcttcattttaactcataatcctcctggttattattattccatttcatgtttattactattacatattttaaccaatcctctggtgattaataattgagttgctacagtttttggctttatgctgtgatataaatccacatatatatattttttacattgtccaattatttcctcaagtcctagaaatagaaatttggggccaaatgttatatatattttatagcttctgatcatatattgatacaactggtctaggtttactattgtatagttccacaaattgtgttcaagtgccagattcaattctccctcataaacatttattattattattgaattagctttaatatattataaatttttgtgaataaatatacacatagtaaacttatgacttatagatattatacctgattctcgtggatattccatgctctggtgtatacgaaggtataaagaagacagcaaatgccctcttatcattacccttctttccaggagaccatcttttttttttttttttttttttttttcgagacggagcctcgctctgtcacccaggctggagtgcagtggcgcaatctcggctcactgcaagctccgcctcccgggttcacgccattctcctgcctcagcctcccgagtagctggaactacaggcgcccgccactacgcccggctaatttttttttttttttttggtatttttagtagagacggggtttcaccgtggtctcgatctcctgacctcgtgatccgccctcctcggcctcccagagtgctgggattagaggcgtgagccaccgcgcccggccttccaggagaccatctttatagctgctttcatttttgctttagttgttatagttatcctgttatttagtgtagacctccaaggtttttttctgttatcataatttcattgcttgctaatgtaatagacgaaatatggcatggtgattttgacatgatttgtgtttattataacattaatgcagttaaacatctttttgtaagtttatttaagccatttccttttcttcttttgtgacttgcctgcttcttttttactcatttttgtattggggtttatgttttttcttagtaatttttaagatctctttgaaattaaaggtgtcaggttttgtttgctttttgatattgctgtgtttattcagatacaaaatgtttttccactggaatttctgcatttggatttaggcttagaatgctcctccaacccacaccctcattcctgagtttataaaaactgcctatattaacaataacaacaacattaagaactaacatttcctaagttaacactaaccatttgccaggcccttctaagagccttgtatatgatctcctttattcatcacaaaaaccccatgaggcacatactgttataactcattttacaaaagaagaaactgaaacacaaatgtttaagtgacttagtcacatagagagtggcagaccctgcaatctaacctaggtagtctgactccagaggccacactctaaattgtgatatctgctttaaaacttgaatccatttggaattaatttggtaaaagtataagctaatgattttaactaatttttcccaaatactaagttatctcaatccatctgaataaagtaacatttcctaaactaccaatattagtgtattacccatactcatatttttagttttttgtcagtctgcacatttaagctttatatatcactaaactgctttttaatagccagatctgacatttggataatggggttttgttgttgttgttgttttactttaagttctgggatacatgtgcagaatgtgcaggtctgttacttaggtatacatgtgctgtggtggtttgctgcatctgtcaacccatcatctaggttttaagccccacatgcattaggtatttgtcctaatgctctccctccccttgcccccatcccctgacaggccctggtgtgtgatattcccctccctgtgtccatgtgttctcattgttcaactcccaattatgagtgagaacatgcagtgtttggttttctgttcctgtgttagttttctgagaatgatggcttccagcttcacccatgtccctgcaaaggacacgaactcatcttttttatggctgtgtagtattccatggtgtatatgtgccacattttctttattcagtctatcattgatgggcatttgggttggttccaagtctttgctattgtgaatattgctgcaatgaacatacgtgtgcatgtgtctatatataaagaaatgtgccacatttttttatccagtctgtcattgatgggcatttgggtggttctaagtctttgccatggtgaatagtgctgcaacaaacatatgtgtgcatgtgtctttctagtagagtgatttataatcctttgggtatatatccagtaatgggattgcaagatcaaatggtatttgtggttctaaaaccttgaggaattgccaccctgtcttccacaatggttgaactaatttacactcccatcaacagtgtaaaagcattcctatttctccacatcctctccagcatctgttgtttcctgactttttaataaccaacattctaactggcgtgagatggtatctcactgtggttttaatttgcatttctctaatgatgatgagctttttttccacatttattggcagcataaatgtcttcttttgagaagtgtctgttcgtattatttgcccactttttgatggtgttgtttgttttttttttcttgtaaatttgtttaagttccttgtagattctagatattagacctttgtcagataggtagattgcaaaaaatttctcccattctgtaggttgcctattcactctgatgatagtttctttggctgtgtaaaagctctttagtttaattatattccatttgtcagttttggcttttgttacaattgcttttggtgttttagtcatgaagtctttgcccatgcctatgtcccgaatggtattgtctacgttttcttctggggtttttatggttttgggttttacatttgtctttaatccatctaagttaatttttgtgtaaggtgtaaggaagtgatccagtttctgttttctgcatatggctagccagttctccggataatgggtttttttttaaggatatataggcttgttaacttgttaactttatttctacatacacaccacacacacacacacaaacacacacacacacacacacacacacacaaagacatcacataaattcaacacataaattttaaaaatttgcagttctttttttctctttttattctcaaattttctttattttatttttccataagtttttggggtacaggtgatatctggttacatgagtaagttgtttaacggtgatttgtgagattttggtgcactcatcacacatgcagtatacacggcaccatatttttagtcttctatcgctcaccccactcccactcttccccccaagtccccaaagtccgttgtatcattcttatgcctttacgtcctcatagcttagctcccacatatcagtgagaacatctgatgcttggctttccattcctgagttactttacttagaatgatagtctccagtctcatccaggtctctgcaaatgttaagtgatgcatctgctgataaagctcttgaaaagtatttcatagtggcattgctgaaacaagtcacttctagcagtattttcgtcttcatctgatttgtgtcatttataagatttttttaaagactgtttccttttgcccctattttgaagccagatacaacagagtatgcaatgtatagggatttaaagtagattagtggttaggactagggatgggaatagagagtgactgtaaatgggcatgaagttcctttctaaggtgatggtaatgtttcaaaattagactgtgatgatggttggaaaattcggtgagcatactaaaatttatgatattttacacctaaaataggtagattttatgggatataaattatgtctcaacaaaccaatgttttataaaagcaaccctatgctcactcaaaagaaaacacatgcacaaggaaggtgggatattgaaaagtgctgatattaaccatgaagaataagcctcaaaaatgttgtcaagttgggataaatatggagataattagaatttgagagctattcactgttgtcctcaaacagacattatcttacaataagcatgttgactatgggatctattgtgaatgaaaggaaatgttgggaatgtattgttaaaaaatatgttactaaagtcatatgtgattggggtttgaatagaatttttagttgttagagaatagaaatccctttgtaacatctaagtatgtttccagtttctgtgcatttgtattccatatttttgagatacttatgtaccaacatagtagattttactgtatactttgatagacttttgtactttgtgtttttccattgatcttcacttttctgatagcagtaggctgatattatcattaaagccgcttaataatacactttactatccagtaagataaattcctcatcttattcttataaatgttaaagagattggttgtttcattcatttgatcttgcaaataaacctttaaatcaattagaaaatatatttaaaataaatagtggtcttgctctggaatttacttatatataattttgatatgaatgaacatctttacaacatgaaatgtttccttccaggagcatagactatctccacttactctattcttttaaaataatcatctaataaaattttgtaaactttaaaaatctagattcataatttttaagattttttctatgtacattatatttttgctgccattgagagtgggatttttttatttcttaaatctcttatatatagaaaaaaagctgtctttatattgaggtatagtttacatttaataaaatgcatacatcttaagtgctcagtttaatgagttttgacatttgcgttcacacatataaccaccatctaaaacaaggccaccatctaaaacaaggtatagagcattttcatcaccctagaaagttttctcatgccctgttccagtcagtacccccaaaacagccactttctgacttctatcactgtgatttcctcttcttgcacttcatattttaatgtgtgtggaggattcttttgttcagcgtaatgcctttgatgttcatctatgctgtgagtgtatcagtagtttgttcctttttcgttgttaaataatattaccctgtatgaatatagcagaatttgtttatccatttctttgctctttaacatttgggttgtttcaaattttttgtttgttttcttgctaatatgaatacagctgctatgatgattcttgtataagtctatgtgtggacttatgtttctatttctcttgggtaaatacctaggagtagaattccttgatcataggatatatctatgtttgtaagaaacacaaatatcttttcaaagtggttgttattatattacattcctaccagcagtgatgtgagttccagttgcttcacatctctgccaacatttgatgttgtcatcttttttatttcaaccattctgatgatggcatttcgttgtggcttttctgtatgactaatgatgagcaccatattgtgtatcttcttttattaaatttatgtggggtttttttgctcatttcttttctctctctcgctctgtgtgtttgttttttgagattagatctcacatgtcacccaggctgaagtgcagtggcacaatctcagcttgctgtaacctccacatcccaggcttaagtgatcctcctatctcagcctccagagtagctggaactacagtcatgcaccacaatccttagctaattttaaaattttttatgaagatgaggtctcattacattgcccaggcaggtgatttcttaaaattcttttgtagaggggggaatctctctatgttgcccagactggtcttgaattcttggcttcaagcactccttttttccccatttttagttgtgttgtttatctttggatttgtgatttgtaggaattctttatttttatatacttattcttagccactggtctcattagtttcaatagttcttcacttggttatattggatttccagctaagcaattatatgctctttgaaaaattatatatttgcttctcttttgctgtaattttaccttttacgtgttttattattttatggcataagctggaacctcccaaactgttgagtaattgtggtgacagccgatactgatcctgaatataatgataatgttattagtgttacagtattaggttttatatttatttttattaggaatggatgctaaatattccccaatatttttctattgagatgtttgcataatttttctccttcagttcattaatatgatttattatattcctagtttactaattttgaaatatccatgcctctgggataaatcctacttggccgacgtgtattcttaatactgatagattttattcattaatacattatatagtattttaaaattatattcacataagaattgacctatagttttgtttgcatcctttgttgttattgttttgatggatatgcttccttgttttgtgcatctttgtctgatactggtttcagggttatactaaacttaatagaagagttggagcattgttattattttctcctctggaatgtattttttaatacatcagctacacgtgttattttatcattcccattcccctatttcacccttgagagatttttccctacctcacctctcctcttcctatattgttatactggcatatgtcgagctctggaggttcctaaggctccctgttttacctgctctggaaactgctcttggttcccctgctgccaagcataggctttgtctctgttccagaggccctgagttgttcagatttgtattttattttggaataagccctcatgaactaagctgcagggtgtacctagggcagcaataaacacagttctactggccctgagccatgtaataggttgaacatatgaaactccccatatcccaccagtttcaacctacaaaaatggcagtttcacataactcagaataatgcctggactccctcctccagatgtttggaagcacctggagggtgggaaagccttaaattttctctgttagagaccttggaaggagatgcctgcaattgttgtaattgggacacttcgtttgggggaaaggcttcctgatgaacatgtccaacattctttttacatttttctagattgtcctagagagttcttttattattattattatactttaagttttggggtacatgtgcagaacatgcaggtttgttacataggtatacatttgccatggtggtttcctgcacccatcaacccatcatctacattaggtatttctcccaatgctatccctccccttgctccacacccccaacaggccctggtgtgtgatgttcccctccctgtgcccatatgttctcattgttcaactcccacttatgagtgagaatatgccgtgtttggttttctgttcctttgttagtttgctgagaatgatggtttccagcttcatccctgtccctgcaaaggacatgaactcattcttttttatggatatgtgacattccatggtgtatatgtgccacattttctttattcagtctatcattatgggcatttggttgtttccaagtctttgctattgtggatagtgctgcaacaaacatacgtgtgcatgtgtctttctagtagaatgatttataatccactgggtatatacccagtaatgggatttaaagatcaaatggtatttctagttctagatccttgaggaattgccacactgtcttccacaatggttgaactaatttacattcccaccaacagagtaaaagcgttcctatttctccacatcctctccaccatctgttgcttcctgactttttaatgattgccattctaactggcacaagatggtatctcattgtggttttgattttcttttctcgaatgaccaatgatgatgcgctttttgccatatgtttcttggccacataaatgtcttcttttgagaagtgtctgttcatatccttcacccacttttcgatggggttgattgtttttttcttgtaaatttgtttaagttccttgtagattctggatattagccctttgtcagatggatagattgcaaaaattttctcccattctgtaggttgcctgttcactctgatgatagtttctttccctgtgcagaatctctttagtttaattagatttgatttgtcaagtttagcttttgttgccattgctttcggtgttttagtcatgaagtctttgcccatgcctatgtcctgaattattgcctaggtttccttttagggtttttatggttttaggtcttacgtttaagtctttaatccatcttgagttaatttttgtataaggtgtaaggaaggggtccagtctcagttttctgcatatggctagccagttttgccaacaccatttattaaatagggaatcctttccccattacttgcttttgtcagatttgtcaaagatcagatggttgtagatgtgtggtgttatttctgaggcctctgttctgttctattggtctatgtatcttttggtaccagtaccatgctgttttggttactatagccttgtgatgtagtttgaaatcaggtagcgtgatgcctccagctttgttctttttgtttaggattgtcttggctatatgggctcttttttagtgccatatgaaatttaaagtagtttttctaatcctgtgaagaaagtcaatagtagcttgatggggatggcattgaatctctaaattactttgggcagtatggccattttcatgatattgattcttcatatccatgagcatagaatgtttttccatttgtttgtgtcctctcttatttccttgagcagtggtttgtagttctccctgaagaggtccttcacatcccttgtaagttggattcctaggtattttgttctctttgtagcaattgtgaatgggagttcactcatgatttggctctgtttgtctattattggtgtatatgaatgcttgtgatttttgcacattgattttgtatcctgagactttgctgaagtttcttatcagcttaaggagttttggggctgagatgatggggtttctccactctagccacactagcctccatgctgttgctcagggttgttttccctgcctgaaccacttccccctagatattcacatggcctgctccctcacttccttcaggtctcctcttagatcttcgaggtcttccctgaccatcctgcttaaaattttatttctttctgctgggtgctgtctcccttttctaaaagtaacagttttcaccatttaatatacaatatagtttacttatttaatatgttaactgtctgagttctagaatggcaacttgcatgacaactctactatgtcacacattcttattcacctctgctttgtattcccagcacctagtataatgcatggtacatggtagatattcaacaaatatatttaataaatgaatgaaaaattttaaagtgaaaacctacctgtttctctttctctctctctccctcttctctttctctctttttctctttatctcttcctttctctctctctatctctctttctctctccctctttctttccttccttccttccttccttcctcctcccctcccctctcctctcctctcctctcctttcttcagcatgtccagattctccccaacctcctacaaagctgccttagcttgtattcccagtaaatgagagcaatgcctttgtggaaagaagagcagattcctacacaccatagactaagtcatggaatttcccaagtcatcagggctactctggtgccctagtttgtcagccaaaccatctcagcacatggaatgaccttgggctgttaccaagaagtggattccctgtagcagttggcttactctttctagaaaggcctgttagtctctaatatagcattgggtagagcaaactgcagacctctgctacatcccgggaattgaaatgggaggcttgttctaaaattctcataggaatttttaacacactctaaaaatgtccacctttgaatgaagatttagggtcagagagagcatacagggatggaaagtatcttccagactgatttttgacactggtgaactttgtgaccatgggcaagctgttcaacctctctgatgatatgtgatcattccctgcagcccaaagccattccatttaaaaaggatatcttatttgttttctttccagtgtaattatgtccacaacatagaaaatgcctctagcatgtttgtatctcctttatctagtatgtagataacaacataagagtatctttgaatgagagttgagtggtggagagaagtccctgatgtcaactgtccctgatcaacctattgttcccttcctgtagagactactgctattcatccattgatgtactgagttcatgaattatggacccactctatgccaggcactgttctaggaggtgagggtacaacccagagaattagttaacatatgtatttcagacactgtgctaaacactttacatatatcagtttatttaactagaaagagagtgagagagaattattattgtctctatttgaagcacatctgagaagtcttgattattcctaagctaccttttattggaacaaagccttttgtttccctcaagagttttaggaaattgcactggacccagagggaagtgttcttcaatgcctgtgcttggaggaaaggcagatcctcttttactaaagcatcatttgccctatttcacaagcaggattcagtcaaggtagcttctctttctttatttttttttctttttcccaccagcttcaaacgcaaaaataagttcctgctgataaaaggtgagaggcaaggccatctcttggcccttccacaagggtggaaacattgcatggaaaagggaagaatctggagacacttaattcccagtccagctcctccagtttccctcatatctccgccacacaagagaagagaatatggccacttccctctttactagccactaagagcttcttagtctatgcatgggctccccacttgggaatggtataggctctgtagtcagactgcctggttggggcatggcttcagcactaactagctatgtgagcttggacaagttaattaacctctgactctggattcttctctataaaaaggccatagcccaaggtaaaagtgccaaaaggaagaagatatagctcctgccttcagcatctcagagtggcaaatatatcaaattccatgtggtaataggaacataggcagagaattaccaaagcagagagcacaggctaggagaggccctgaagattgcacagagaggtctgggtcttcaaagatacaaaaaaaaaaaaaattaccagcagagaagtgagcaggagttattcaggaagaaacagcacacaaagaaatgaaagagaaggtttgcgatgagtcagaaggtgggtgtgggggttaagaatagtttagcctgattggagaattgagtatgttaggagaaagaactgctggaaaagtcattttttatataatatgctaaggaatttggaatttaacctaagagcacccaatatccatggaacgatttaagctaggagtgaaataatcagatctgtgtttacacagaggatgcattggaagaggtaaattgctcctgagtaatctttcagagactgaaggaaaagagttgtaatcagcacacattttacagttagaatgaacatgacttggtgacccaagtactaagctctaagagttacatggtaattgtgatggaggaacagttgatggagatggaagagggatgagggaggtgcatagtgctcctctccagggaaacatttaaaaaaaaaaaagaaaaaaaatcctatgtcctatgagtatccatggagcaagtctccacccatggtagaataaaatattgcctttttctttatgattgttcatactactgagaatgttggcttaattcacttgctgccatgcttctctttagaaggcatctttactagagaatctcatcatcccgtctcccataaactgcaggaattcttagttttgatgggaaatttcaggatgacgaagatgctgagaatgcaaggtcaattcaaaattatttccagctcatcttaatgtgttcttttcttcaaaagccgataaaacacactgtggcagtcagagctagcaaacaacactcagttctaaggatgctttgatattcccacagcttttaaataaaaaacaatttttcatctccagttacttttgggttttttcttattgagtattggtagatttgtaaaaaaatgaaaataaaaaagtcttttcagaataggttcttaacatcaaattaaatgctaaagcctttctgtagccctttaactttgaaaactgctgtctttgttttagccaaggactctccttgactagacatgctccctggggaaataggcagagttttaaaaatcatgtttgaatttcaaagtatctattaagaaagcatgttagaaaaaataagaggtttccagtaccccaaattcctgtgtcaggtgcaccaaggattgaaaggcttcacctcctttttcccatatccccttttaaagtacatgtgttcctaggatgctgaattaagcattattattcaacagccctcatcatttctggtctctcagtctccgtatcttcccctcagatacaatgcatactccaaacagattgtggttttagactgtgatagagaagaatattctaaatcttcttgtgtcttctccttgttggtcttcgttctaatcattggaatcatgaagaagtttagtttctcttctgtgtgactgacacccctccaaatttgtgctgacaggaatcttgtgtttctttaatgtttaatttaaatcttaatagttcctcattactccttatgtaatcctgaccctctctcatggtggttactcaactgtctttcatctgcttacatatctctaaaattgagattaccatccaaaaggcaggcaataacaaatgctggcaaggatgtggagaaaagggaatgcttgtgcactgttgatgggaatgtaagttagtataaccactatggagagcagtttggaggttcttcaaaaagctaaaaattgagctaccatatgatccagcagtcccactgctgggtatatacccaaaagaaagtaactcaaaatattaaagagatatctgcactcttatgtttgttgcagcactgtttataatagctaagatttggaaacaacctaagtgtctatcgagagatgaatggataaagaaaatgtggtacatatacacaatggagtactactcagccataaaaaggaatgagatcctgtcatttgcaacaacacagatggaactggggatcattatgttcagtgaattaagccaggcacagaaagacaaacatcatatgttcttatttgtgggatctaaaaatcaaaatacttgaactcatggagatagaaagtggaagggtggaaaggtgggaagggtagtgaggggctgggggagtgtggggatgggtaatgggcacaaaaaaattagaatgaataagacctactattcgatagcaccatagggtgactatagtcaataacttaatgtacatttttaaataacttaaaaagtataattggattatttgtgactcaaaggataaggggatggataccttatttgaggggatggatacctcattttccatgatgtgcttatttcacattgcattcctgtatcaaaacctctcaggcaccccataagaatatatacctactttgcacccaccaaaatttacaaaaataaaaaatatataagtagcacagcaaaaaataaaaacagaaaataaaaaaataaaattaagatattcagaaaagaattaatgtctctagtgggttatggctggtgcacatccctttctgtccagactatacctctactgatacagcctaaagcaaaatgagtttctggtagccatatcgcattttgattcaaaataagactaaaccataaagccttttattttcacatgcattaggttgcatctacttcagatgttgtatcattgactttttaggccctcagataatttatcttgatacatttatattgttaggccttattgatcttacctatctgtcagaatctttatggatcttgattctgtactccagtgtacttattatgcctagtgtgccataccgaaattctatttctccttctaaacaattgataaaattacagaactggataatacttaggttgttgaatcattcgtggcatgctttagctatggttgtcaaactagattataaattcacctcattttactatcatctggtctaaatctatccagatcatccataagggtatcaggagagagcttaccagatgttgtgtcaaggtccacatttactgtgcctacaacagctccctaatatgtgagtccaatagcctaagttaaaaaaaaggaggtgatattggtctggtatcatctgcttttaatgaatctattgggacacaatgatttttaggggttcagaaaccatactttttaatcaatcccagtagcatgcatgagatgagcactgagcttacttttccaagaaaaggactgagctctttacatttacctatatggtttccctctctgccagttagggtccttggccactgccctgtggtgaagctctgccctgtcatcctagacagtgggcccctatggagcagaaagaagccagttgcctctagtactgagaaaagcagagtacctggtaagccctcagtgagatattgttggctaagtttgtcacagaagagagtgtctgccaaatgtaccacaccttccctgactgtttgggacgtgttttgaaatgtgaaagactcaaatcccagcagtgcaaagctggacatcatgtcattcaagacaagctagagctgtctctttttttacaggaaggcacagaggttactgagattgagcaattattacacttactgtcattaaattcttctttgtgttattgttattatcaatcccatctgccactgcagctctaggatacaagcagcttcctacgtggtggatatgagataggagccttccagccactggtactccagaagcctttggaggaggggaatcccaatcatgtggggaaggaaggaactataatgtctcatcatctccacaagcagaaccaagccttttctgaagccttttgtgggcactcacctgtgtgtcagtgcatcagcccagactgggaagcccagactcagagtcatgttgcagtgtaggcatgaggatatgtaaacaagcaactgaggctcccttctatgctgtgcaactcgtgtatgacataggatcctatgatattagcttgtcatagcagccatcctgcccaatggtctcacttctccttttgccttcattgttctacagtagcgcatgtgagagagatggtggtatcttaagatagggtagcactatggaaaaggagaaaattggacaaattctagatatttttggaagtataaatgtcatgacttgcagatgtgggaagctgagagaagaggggcaatagagatatgatgactaccagatttttagctttagccactgagaggaattttttttttccaaactgagattcatcttgccttcaggcaacttaggtaggaaggctgtgagcaagggaggaaaaattagctccattttcaaaatattaatagtgagttgcttatttgatcactaaataagaaaacacttgtatatatgagtctatggtgcatggaagagatataaatgttggagtcattcacatataaatggcatgttaaaccagggaactggagaagatcagatatgatggcgatgtgaatgcttttcgttgaccgtaaggagctttgcacataatgtgatgttgttatcttgtccattcctagctgaacatatcattggccaaagaaaattattttcaaattggggctagtcctaggtaattagacctggaagcatttgagggagtaattcagaaagagaaaaggagtgggctgatcccagacccttcccatcccatggccctgtgaggctgcggagcttgccggagccccagcaccagctcagaaattgtcatcctccaggcacacttccaattcaattaatcatgttaatatctataagtaaagtgcagtcaacagttactttaacagtgaatgctaattattagtaggatccatcgcttaagaaggactttttgccaatcttgtcatgtctggggaaaatatcaggaatagagttggcatttctgagaaaataggatgatcaaactattaacgtcgtccatgttataggtggacccggcttggaccatcagtgtgattattacaggtgaagattaaggacacttgagagaaatgttacaattaagatttcctctccccttgctaaataaatggtttcttgctgttgcctctcacaatggtttttgctttagaaagaggctctgtaagtacaggatttctcagttagccagtagtactaggaaatatggtggctgggaaggagggaagggaaaccagatgtccccagagagcccggtggctcactggacatttgatccaaagaccccaggaagctgggctactgagggtgcaacacatatccaaggaccctcgaaactttccttcatttgcacatcaattcattagtgaaagaaacagggactgggccactcctaagttgcagtcactggggagaggtgggtaagtgggccttccccttgaaaagtacccagactggtggaagtgacaaatgtgtaatcaagtgtaataacagctacgtcatgttcagtatttactgcataaagacattttctcatttagcctttttatcaaccttatgctgtagatattagtttccttttccaaaggaggagaatgcgaacagaaaattgagaaactgagaaattacatagtttatttcacgttgcagaatgattaaatgaggggtcaagacttgaattcagcttcagtcccttgcactatatgtctaggctgcacgagtttttaaatacaagtgaagtcatcttttgggttagacttctaacctcaattccctgtcttcagaaatactttcagctactttgtttctttttaaatatgcttccatattttatataaaatgttagatttgacttgatttttaattttatatttctattgaattttattatggaagatgaagatttagctcttaaattcactagccacacacacacacacacacacacacacacaccctcacaccttacttccctctcccattttctcaaaatcgttatacacttgtggagataattattcatgtttgtatcattattgttatgtaaacatgatgtatagctgaaccatgtatgtctctgtggttacattcttttttcctcccaggagttggtaatttgtatctctaacctgaatcttcccctgatttccattctcttatatctaattggctactcagcatctgcatttggatgtctaataggcatctcacaattaatgtatgtgaaactgagttcttgatctctcccatagtccagtacttctccccctccacttggaaatgggtgttaatggcaattccatctctccacttgctcaggcaaaaaattctggaattgtccttgactcttctctatcacttcttccattagaaaatcctattgctttatcttcaaaatgtgatgacctctcaccacctgcactgctttctttggaacaagccatgtcacctctcaccaggttcactgaagtaaccttctaactgatggccctgatctccccagactattcttaacactgctgtgggctatcctgtaatagtgctacttgagctgtgttgtgctacttttctacttcaatctttgtaatgaattccattcccactcagagcacaagcaaaaatcctttcatagtttacatgatctgatccaccacagcctctctgacctcatcattttcaatctctttgtttctcactatactccagctacacctgccttgcccttcctcaaatgcagaaggctactctctcacctcagggcatctgtgcttgctcctctgtttggaattttccccaattaactgcatggcttgcttccttacctcatttctccaggtccttattcaaaagtcactctctcataatgcctttcctgacctccctatttaatatattatttaactccccactacttaactccctttcctgcttatttcttcccattgcattacatatgtgtattatatgtatacttctgtatatgtgtgtatatgtgtgcatgtgtgtataatttattttgctcattgtctgtcttcacacacaagaaatataagctccatgagagtaaataatttttgcctgtttggttcactgacagattcccagaacccagagtaccaggtactctggtacaaataattgctttctgtaaatgtttgttgaatgaagaatagaggaatgaactatattgtttttgtttgctctgtgtgtgtgtgtgtgtgtgtgtgtgtgtgcgtgtgtgtccatgcagctaattcatcccaaactctgtcagacatttaagtctcttagtgaatacatcaggtttcatttctttctatagaggacaacattttaggacaaagagcatgcctggcagtggtgtaggaaggcaaatgaaaagaatcagattgaaaaactgcctgctgggtactatgcctattacctgggtgacaagataatctgtataccaaatccccatgatacacaatttacctatataacaaacctgcacatgtacccctgaaccttaaaaaaagtttaaaaaaatcaatacataaagcaaatatctatatgcatgagtcagtttctgggctctctgtgcagctccactggtttatttaccctgcacaaatgctacactagtccagtccatcctggacactagttcagttgcattctcataagttttcctatccaggagagcaaatgtttctactttgctttttatcaaaagaattttggttattcttggcactttgcatgtccaagtaaaaattagaatcagtctgtcaagttggaatctgaccgtaattatatttagcctgtagataagtctgggaaatatcttcacaatattgagtcttccaactcataaacatggagtattgctctatttatttagactttccttaactttgctcaataatatttttatctttttctgcagaaaactattggactttttggtaagtgtattacaaggtatttcatatttttaaggcaggtgtgaggttttttctatttttatttgtttaacctgttttttttctggtatataaaaaagcaatttaaaccctggaagaaaacctaggcaatgccattcagtacataggcatgggcagggacttcatgtctaaaacaccaaaagaaatggcaacaaaagccaaaattgacaaataggatctaattaaactaaagagcttctgcacagcaaaagaaactaccatcagagtgaacagtcaacctacagaatgggagaaaatttttgcaatctactcatctgacaaagggctaatatccagaatctacaatgaactcgaacaaatttacaagaaaaaaaaaaacaaccccatcaaaaagtgggtgaaggatatgaacagacacttctcaaaagaagacatttatgcagccaaaagacacatgaaaatatgctcatcatcactggccatcacagaaatgcaaatcaaaaccactatgagataccagctcacaccagttagaatggcgatcattaaaatgtcaggaaacaacaggtgctggagaggatgtggagaaataggaacacttttacactgttggtgggactgtaaactagttcaaccattgtggaagtcagtgtggcgattccttagggatcttgaactagaaataccatttgacccagcaatcccattactgggtatatacccaaaggattataaatcatgctgctgtaaagacacatgtacacgtatgtttattgcggcactattcacaatagcaaagacttggaaccaatccacatgtccaacaatgatagactggattaagaaaatgtggcacatatacaccatggaatactatgcagccataaaaaatgatgagttcatgtcctttgtagggacatggatgaagctgtaaaccatcattctcagcaaactatcgcaaggacaaaaaaccaaacactgcgtgttctcactcataggttggaattgaacaatgagaacacatggacacaagaaggggaacatcacacaccagggcctgttgtggggtgtggtggggggatagaagcggggagggatagcattaggagatatacctaatgttaaatgacgagttaatgggtgcagcataccaacatggtacaagtatgcatatgtaactaacctgcccattgtgcacatgtaccctaaaacttaaagtataataaaaaaaaagaactatgaggaataaccctaaacaaaaataataaaataaaatgtgcttcttgaaaataaaataaaaaaggcaatttatttttgtttcctgagcttgtatccactctattaatcatcatcagtaaacatgcttataaattttaataatttatctgtagttgtcggaatttattttgcatatcatgtcgtctaacgataatgacagaatgaattctttgtgccaaaactttgtaccttttccttctttttcattccttatttcactaagacctcaaatacaatgttcaatagaagagatgatgtaccttattcctaacattaattaaaaagctttcaacatttcactattaaatacaccattgctgtagtcttgtttttagatgctctctttaagaaaattccctttccatatctggtttggatgcctgatttcatcacattttctacattcatttagatcaactataagttatctctttattctcttatgggcagttaagttgtttaaatttcatatgtttaatcaaccatgtaaacgtgaaaacatgtatgtttgtaattcattgtatttttctggattcagttttacattttgtctaatttattaaaatctcaagtcataactgagattgaactgtaattttgcctttcttgtaatggccttttcagcttttagtacccaaaatattatgtctaaaaactatgaattggggaatattccctccttgtgtatttttggaaatatttgcacatattgcgtttacttcttccctaaatgtttaatagaattcaccagtgaacccaactgcacctgaaattttctttatggtaaggtttttaattacggattcagtttacttaatgagacatagacattcagagtcagtatttctcatatctagtttatgagttttgtgttttaaagaactagtccatttaatccaaattttaaaatctatgggtataaagttgtttgtaaaattcttttatctttcaatgcctttaggatgtgaagtggtgttgtattttcaaccatgacatggttattcgtgcctttttttctctcctgcccctttcctttttctgtcttgaaagagggctatttttatttgcctttcaaaagctaacttttggctcgttaatcttccctaaatatacttattttctattcattattttctgttcttgtatttatttccttcattctacttaatttgttgttatgttctagttctttagataaatgatttgatcactgataattggccttattttgggctattttatgcatttaaagctaaaatatttctcaatataattttttagcattttaaatgttttgaaatttattatttttattatcatagagtccaatgtatatctgtttttcatcctgttatttattttgacccatgttttatttagaaatattttcaaatgtatggaaacattctagttatcttttcattatagatttcgagtttaattgcgttatgatcattcctcatctgatctaacatctttgccagccctactgttaactaacctccttccagaatgtttttcatgacatcagctttggtctccgggtgaaaatgtgtggtggttgggttcacaagcatatggaccacaaccacatctccccttcccagtccaggaaaatatgtgtgaaaaggaaattgaagtgaggacattgtgtggttgtttaataaagggttaagtcactaggcttggtgtgcttgaacctgcacattctaaagaaagtaccagctctttactggttcctgagagataatttctaaacccttagaatattctgcctaagagttctttatatgacagaacttgggccaatacagaaaactgtaactctgaatataacagcatttctgggtcctgtgagtccttctagtgaattattgaacctgaggatggtactggggacccctgacacaatggtactaaaaaaatattgaggagactggggtatcaaaagtgtattaatttcttgcccaccttgtgtgaccttctgtaaagccaatatttaataagtttgctgatataaatatacaagtagtattaaagaataattcacgaggacttccagttaaatccatcaggtgaaaaacataagatgctacccccattatctcttgagaactcccccataaaatgagagtagatgaactacaaaaggaataagcaatagaagactttttgctttaaccattcagttataaatgcaattaatttatattgtaggacattatgaatgtcctacaatcttaggcaaaccaacatcacaaaagacaaggtacaaaataaaaatatatatcaactcatcactgaataaaaagagactaaagcgagaagaaagtattctaattaacatctatcactaaggaccaagcgagatcagtgaaaacaagttatccagataacttttggagaaatttcagaaggcataagtacaaagtaaaagtatgaaaagacaatcttaaaacctgcttgggaggaaaaaaaaacctacataagaatggcatcaaacatttcaactgaaacatgaaatacaagaagactttgtgatgtaaaatgattctgaaatacaataattttaacctaaactctatgcccagccaactttctgttaagaattagagcacaataaatactaatttttattatactttaagttctaggatacatgtgcacaacgtgcaggtttgttacacaggtatacgtgtgccatgtgggtttgccgcacccatcaactcgtcatttacattaggtatttctcctactgctatccctcccccagctccccacctcccaacaggccccagtgtgtgatgttccccaccctgtatccatgtgttctcattgttcaactcccacttatgagtgagaacatgcggtgtttggttttctgtccttgcaatagtggtggtttccagcttcatccatgtccctgaaaaggacatgaactcatccttttttacagctgcatagtattccactgtgtataaatattattttaactacctgtgaaactcactggaattttttagaagcccttaatgacatactcaagcaaaatgagccatgtgtcatggttttcattttggaaggatagatgatggttttaagaaacggtagcagttacagaaatgagaacattttaaacatggtttaaatgtttattaataatttggctgtgaaacataatggaatagtaagaaaccatatgtaaaataaagaagcataataaattctagaggaagatttggaaataaagttaacaagcttcatttaattgacaaatagaaatttgtcccctatgaataaagcatacattgtttccaagtgcatttgagcacaaataatagaatagaatggaatttaaaagtggttgaaaccatcagggcatattctctgaactcaaggcaataaagctacaagacaaagatatagtcctttgcaaaaatccatcttctcaaaaattttttaatttccgtttttagtttggatatcgggggtacatgtgcaggtttgttacgagggtgtgttgtctgatgctgaggtttgggcttctattggtcctgtcatggagatagtgcacatagtgtccaataggaagcttttcggcccttgcacccctcccttcctccctccgtttggagtccgtagtatctcttgtccccatgtctatgtccatgtgcacccaaaatttagccaccacttataagtgagaatacataatattggttttctgtttctgcattaattcagttagaataatgacctccaacggcatttgtgtttctgtaaggacatgattttgttctattccatgatgtatatgtaccatattttctttatcctgtccaccactgatgggcacctaggttgattccatgtctttattattgtgaagtgttgcagtgaacatacaagtgcacccctctttttggtagaatgatgtattttcctttgggtatatacccataagtgagattgccaggtcagatggtagttctatttttagttctttgagaaatcatcaaactgctttctacactggctgaactaatttagattgcaaccaacagtgtataagcattcccttttctctgcagccttaccaacatctgctattttttgactttttaataaaagtaattctgattagtgtgagagagtatctcattgtggttttcatttgcattgtggttttcattgagcatttttaattatgtttattgaatgcttatatgtcttattttgagaagtatctgttcataggccaggcatggtggtgcatgcctgtaatcccagcactttcgaaggccaaggtagtcaggtgacttgagcccaggagtttgagaccagcatggacaacatggtaaaaccccatctctaaaaaaaaaaaaaaaaaaaaaaaaaaaaaacctagctaggcgtggtggcatacgcctgtagtcccagctactcgggaacctgaggtgggaggatcacttgagcccaggaggtcgaggctgcagtgagctatgattatgccattgaactccagcctgggtgacagagtgagactctgtctcaaaaaataataatgtctgttcatgtcctttgtccactttctaatgaggtttttttttcttgttgatttgcttaatttccttatagattctgtatattagtccttaatttagatgcataatttctgaatattttctctcattctgtatgttatttactgatagtttcttttgctgtacagaagctgtttattttaatttggttctacttgtcaatttttgcttttcttgcaattgcttttgaggacttagtcatacattatttgcttaggctgatatccacaatggtatttcctaagttttcttctaagatttttatagtttgaggccttacattaaatctttaatatattttgagttaatttttgtatattatgatagataggggtccactttttttcttctgcatatggttgtcaagttattctgacagcatttattcaataaggaatctttttgccattgcttatttttgtcagtattgtagatcagttggttgtagctgtgtggctttatttactggttctctaatctgttgcaatggtctgtatgtctattgttctaccagtaccatattcttttggttactgtagctttgtagtatagtttaaagtaaagtgatgcctctggctttgctctttgcttaggattgcttttgctattcaggctgttttttttattttttgtttcatatgaattttagaatagctttttctaattctgtgaaaaatgacattgctagtttgataagaagagcactgaatctatagattgctttgggccatatggacattttaacaatagtgattcctccaatccatgagcatggaatattttttcatttgtactgcctatgatttctttcagtagttttttgtagttcttcttgcagagatttttcatttccttcattagatgtatccctaggtattttttgtgtgtgtgtgtattacaaatgggattacattattgattccatgctcagcttgaacattattgttgtacagaaatgctactaacttaaatatgttgattttttatcctgaaactttactgaagttgtttatcaggtctaggagactttggtggagacttaagggttttctaggtatagaatcatactgtcagcaaagagagataatttgacttcctcttttcctatttagatgtcttttatttatttctcttgtctgatcactctggctagaacttccagtattatgctgaatagaagtggtgagagtaggcatccttatcttgttccagttcttaaggggaatgctaccagcttttgttcattcagtattatgttggctgtggatttgtcatagatggctctttctattttgaggtatgttccttcaatgcctagtttgttgaggtttttttttttttttatcatgaagtaatgttgaattttatctaaagctttctctgtgtatattgagatgatctttttttttaataattctgcttatatggccaatcacatttattcatttgcatatgttgagccaaccttattctgtgtaataaagcctacttgatcatagtgaattaacattttgatgtgctgctgaattaagtttgctggtattttgttgaggatttttgttctatgttcattagggatattgacctgtaattttcttttttgttgttttgtctttgccagattttggtgtcaggatgatactggttttctagaatgagcctccttctcaatttttggaatagtttctgaaggactgcctccagctcttctttctatgcctgatataattcagctgtgaatccatcttgtccagagctttttctcactgataggtttttttttattactgattcaatttctgagctcattactgatctgttcaggttttcaatttcttcctgattcagtcttgggaggttgtgtgtttccaggaatttatccatttcctctagattatctagtttgtgtgcatagagttgttcataataatctctgatgatcttttgtattcctgtgggattggttgtaatgtcaccattgtcatttctttttctttttttttttttaatatactttaagttttagggtacatgtgcacaacgtgcaggcttgttacatatgtatagatgtgccatgtttgtgtgctgcacccattaactcatcatttaacattaggtatatctcctaatgctatccctccccccttcccccaccccacaacaggccccagtgtgtgatgttccccttcctgtgtccatgtgttctcattgttcaattcccacctatgagtgagaacatgtggtatttggttttttgtccttgtgatagtttgctgagaatgatggtttccagcttcatccatgtccctacaaaggacatgaactcatcattttttataggtgcatagtattccatggtgtatatgtgccacattttcttaatctagtctatcattgttggacatttgggttggttccaagtctttgctattgtgaatagtgccgtgataaacatacgtgtgcatgtgtctttatagcagcatgttttgtaatcctttgggtatatacccagtaatgggatggctgggtcaaatggtatttctagttctagatccctgaggaatagccacactgacttgattgtgcttgtttagatccctctttttctttgttaatctagctagtagtcgattaatcttgtttatcctttcagagaacaaacttttcatttcattgatcatctgtatgttttttggcagtctcaagttttttttagttctgctatgattttagccatttcttttcctctgccagctctgggattagtttgttcttgtttttctaattcctttaggtacaagtcagattattaatttgagatttttctatcttcttgatgtaggtgtatatccctgtaaactttactcttaacactgcttttgctctcagagatttgggtatgttgtttctccgttttcatttgtttcaaagaattttcaaatttctgccctaatttcaatgtttacccaaaagacattcaggagcaagttgtttaatttacatgtaaaatatgtggttttgagagttcttctgggcatttctattttttttttaatttttatttccataggttttgggggaacaggtggtatttggttacatcagtaggttctttagtggtgatttgtgagattttggtgtacccatcacccgagcggtatatactgaacccaatttgcagtctcttatccctcacccacctcccactattttccccattttattccactgtggtctgaaaaaatgcttagtatgattcagttttttgggatttattgagacttgccttatggccaaacatgtggtcaatttcagattatgttctgtgtgcagatgagaagaatgtacattctatgattgttgaggggagtattcttaaaatgtctgttaggtccaatctgtcaagtgtctaatttaaatctataatttgtttgttagttttctacaaagagagaatctgtctaatgcttcttggtgggatgttgaagtttcccactattattgtgtgactgtctaagtcttttcctgggtctataagtacttgtttatgaatcccaatgtgggatacatttagattcaggatagttaagtcttcttgttgaattgaaccctttatcattatgtaatgactttctttgtccgtttttattattgttggtttaatgtatgttttacctgatggaagaatagctacccctgttcttttttgcttcctgtttgcgtaatagatttttctccatccatttactttgagcctataagtgtcattgcatgtaagatgggtctcttgaagacagcaaaaagtggcttttgttttttttattcatcctgtcactctatgtcatttaagtgtttagaccatttacattcatggttaatattgatatgtgaggttttgtttctgttatgatgttgttagcaggtttctttgtagtctgattgcatagttgctttatagagtctttggcttatgtacttatatgtgtttttgtggtaacagattttgttctttcatttctatgtttggaactttcttaagcatctcttataaggctagtctagtggtaacaaattcccttagtgattgcttgtcctcagaactattttagtccctttattagtatttagtttacatataataaaattaaccaattttaagcatataagttttgtcccatacttataatcatgtaaacattgtcatgatcacaacatagactatttctatcttcaaagattatgccctctgcaatcaatcttttcctcctactcctggtctcctgcatccgccaatcactttatctcgctgtatttttgcttttcctagaatttgatgtaagtatcatatagtgatacgagtgatgtatgatgtgtatgatgtgagtatcatatagtacattgtcttttgtgtctggcttctttcattcaacatagtgcttttgagatttatacatgttgtttcttgtatcagtagcttgttccatttggttgctggttaatatgccattgtatgaatataccacactttgtttattcattccccagttgatagacatctaggcttcttttcagtttgggtcagaacaatgacgtacaagtctttgcatgactccatgatgttatttcacttgggtaaataactaagtgtgggattactgggtcatttgacaagagaatgtgtaattgtaagggaaactgccacatttgcctttcaaacagcagcttatgagatggtcagttcctccacatcctacacaacaattcatattgtcactctttcattttagttagactaaataattagactagtggttgtgtagcaatatctcactatggttccatttaattttgataaagtaagtagatttagatcttttgcccatatttttgtcagattgtctgaaatatatgacttctatatatttatacatacagtcttttattggctttatattttacaaatatcattcagcatgtggcctgcccttccccttttccacaatatgttttgaagagcaaaagttttttactttaatgaagtacagtttatccatttttttgtatttggctttgggctttttgtgtccatctaaggatttgttgtctaatccaaatcgtggacattttctcctatgttttcttgtagaagattcatagttttactttttacatttagatctattgtccatttccattaaaatccttcatacaaagtgaacaaaacatcatggttctttttttgtttctttgtttgcaaatagatatccaattattcagcaccatttgttaaaaagagtatcctttattaaattatgcagcacccttctagaaaaatcatgaacatttaatgagggtctgttgaccatataaatgagggtttaggtatagcctcttcattttgttccattgagtgctatgtctgtccttttgccagtacctcactattttgattaatgtagttttattctaaatctcataatccagtagtgttaagtcttcccattttttgctttttcaaaataagtttgaatgttctaggttctttgcattttcatattaattttagaatcagtatttcaacatctatgaaatatatattgggattttgattggaatggcactaaatttatagatcaatgggaatgaattgatatcttagctatgttgagtatcccaatccatgagcatggaaactcttcatatatttatatcttatctaatttctctcatcaatgttggtagttttcagcatataggtcttgcacataatttgttaaatgcacccctaactatacatgtaaatgcattgttaaattttactcctcaattatttcattgctaatatataaaaatcatattgcttttgtactggctttgttgactttgctaaacttatttgttttagtagcattatttatatttctaaggattttctgcataagtaagcattgcattggaagttaagatgattttgcttctttttaatgtatatgtcttttatttctatcttatttcattgactgaaacttccagtacaatattgaacagaagagatgagagcagacatcctcccaatgctcctctagggagaaattttcagtctttcttcatgagtataatgttagccgtagctttttacagatccccatcctaagagaaggaagtctccttctattccaagtttgctggagcttctatcctgaataaatattgacttttatcaaatgatcattttgcctctattcatgttttttttagtctatgatttggtgatttaccttgattatgatgttcaaatgttaagccaaccttacattcccagaataaatcttactttttcagaatacatgtcctttttaacatttatatgagtttagtttgctaaaatgttactaaggttaattatatctgtgtccatgaggatactgatctacagttttcttttctttttttttttttttgagacagagtctcaccctgtcgcccaggctggagtgcagtggcatgatctcggctcactgcaaactccacctcccaggttcacgccattctcctgcctcagcctccccagtagctgggactacaggcacctgccaccacgcccagctaatttttttgtatttttagtagagatggggtttcaccatgttagccaggacagtctcgattacagttttcttatagtgttttgtctagttttagcatcagtatattactattctcgtgtacgggttaagcatccctattccaaaactatgaaatctgcaaggcttcaaaattgaaaacatgttgagtgccaacaaatggaaaattccacacctgacctcatgtgacagcttgtagtcaaaacatacagcacacaattttcagccttcccaaggataaaaggaccccccagccctgtttagctgtgatgtgtcttctccatggacactcatgcaattatttccacaaaggacaatacagtatcatgtgtgcaggctagacacaccaaacagcaggttctcccatgatgctccatatagggccaagacatatgttttactcattgtggttttttgcttattctctgcaatgtggtataaaaatattatggaaaatgtcaaaaaggcctgcagacacccctatggtaacagtgataagaataagaggaagcatttatgtttgtctgttgcacagaaattcaagttatttggagaaactggatgatcatataagtatgaaatgccttacagaagagtatggtgttggaatgaacaccatatatgacctgaagaaacagaaggataaactgctgaagttctgtgctgaaaatgatgagcagaagttaatttaaaaaattgaaaaacactgaaccaaactaaaaatggagatctcaatcatgtattgaaagagtgcatccatcagcattaccgtgaacacatgccacttaatggtatgctgattattaaacaagcaaagatctatcatgattcaatgaaaattgaggggaattatgaatatttattaggctacttgcagaaacttaagaaaatacacagcactgaattttaaaagatttttggtaataaagcatatgctgaccatgaggcagcagagaaatttattgacaagtttgccaaagtttccactgatgaaaatctgacactggaagtccataaagttgttgacacatcactgttttggtgttattgccccagcaagacactgactacagctgatgagacatcctctataggaacaaaggatgccaagtgcagaattgttgcattgggatgtgctaatgcataagacacacataaatgtaaacttgccgtcacaggcaaaagcttgcatcctcactgttttcaaggagtgattttcttaccagtccattattatgctaacaaaaaatgcatggatcatcagggacatcttttttctgattgatttcacaaacattttataccagtagcttttgcccacggcagggaagctggactggatgatgactgcaagattttgttatttcttgacagctgttctgctcatcctccagctgaaattttcatcaaaaataatgtttatgccacgtacttaccccaaatgtgacttactgagttcagccatgtggtcagggtatgcttagatcagtgaagagtaaatataaaaacactttcttgcacagcatgctagcagcagtgagcagaggcatggatgtggagtgttttcaaaagaagtttagcatgaatgatgccatatatgctgttgccagtgcttggaacacagcaactaaatacacagttatacaggcctgacacaacttctgtcctgtaactatgtccactcatcatgatgaaaaaagtgatcactttgaagtattccatatgtcaagtgagggaagaaaatgcctgaccttacatatgcaaaaaatataccttcagagtctgtcagtcagctggaagaagtagatattaagaagtttctaaaatcagtaattaaactccagttgttccttcattaaccaaacaatggtgaaatagtcaaacagttctgaaacaaggtgattgtaataataatgacattgaagataatattggtaatacttcagaaaaagtgcccatagatgacatcatgaaaatgtgtgataggtttattgaagcactcactagagcagcatgcatttataagacaactagaaattatgtcagtttataaaatcaaagagagacttctaagacaaaaatcagtgtcaaagcagataactctggagaagatatttttaaaagccattctagcagaatgcctcctcatcccgagagaagccacctcctagtccctcaactgcttctgatgttccttctcacctaaataaaaaacagtgtacagtaaccttttaatcaaaacatgtgtataatatgtaatatatataataatgtaggtggagactgaaagcctgctgctatctgttgtttaacagctgatacaggtattctggtgatgctagtgtgctatttggttaccctgaatacattattttttcactgtattaatggcatgtcattattttactattatttatttgtgaataaatatgagaaagtgattatcagtaacgtaaatttatagtcaagaatgatggtgatgccaaaccaccacagattttccacaggaatatctgaggtaatgacatctttgctttctcatggttcaatgtacacaaactgttttacacacaaaattactaaacaacttttttttgtaaaattaccttcagtctatgcgtgtaagatatatctgaaatataaatgaatttcaggcttaggcattatcctgtccccaagacatttcattatattttgtatatatataatacatatatatcatatataatgcaaatatatatatgcaaatatttcaaaatccaaaaatacctgaaatctgaagcacttctggttccaagcattttggataaggaatattcaacctgtaattagttgggaagtgttctcacctcttttgttttctggaaaagctgtgtagaactgatattttttccttaacgatctggagtattctttgttggaaggtttttagcaatgactttaatttctttagtagatataagactactcaagctatctattttttctttagtgtggtgtgattgtttttatcttttaagtaatttttttattttatataaggtgtcaaatttcttgtcataaaattattcataaaatttccttattattttaatgtctatggtatctatacagatttacagacttccatttttatgttgataattaatattttctcattttcttttctgatccagtgtcactaggatgttgtttttattgatttttctctagttcttttatgttttattggttttgccctttatttattatttctttccttatatctcctttttgtttcattttctcttgtttttcatgttccttaagttgaaacttaaatcattattttgaaatgatacttttttttgaacataagcatttaccgctatagatttcctcataagcactactttgtttgtgtcctacagattttgatatttgtgtttttatttccagttcattctaaaataattttaatatccctgttatttttctttaatttgtggataatttggaaagatattatttaatttctaaatatctggagattttccagatgtctatgagtaaattttaatttcatttcattcttgacaaaaaatatacttcattataatgttagtcttcttgagtttaagggccaagaatatggtttatcttggtggatgttcagtatacacttgaaaagaatgtgcattttgctgttgtaggatggagtattgatgggtggagtgaatatcagttaggtcatgttgattgataacattgttcacgtcttttatattcttacttcttctcttttcgtatgttcagtcaattactactaatagagcagtgtttaaatctctaactctacttgtggatttgactgtttctactcttgattatatcagatttgtttagtgtattttgaaagtctgttattagatgcatacacatttataattgttatgtctgtttgatgatttgaggaccctttatcaatgaaatgtctgtttcctccatggaaatgttccttagtctggaatcttctttgagattaatacagtcacttcagctttcttttgactagtatttacatggcctaatttgttttttatcctttaaaaatctttttttgtgttgatattttaagtaggttttttgtagacagcatatagttgagtcatgctttgttatccaatctgaccatttctcttctttcaactgaagttattaagtatacacattgaatgtaattgtcaatgtttaaatctgccttttctaattctaattgtttcatccatacttttgttcttatttttctcttggattgagcacttttattattccattttatctgtaataatggcagactatatatactgattagctttttagtggctattttagtatttgaaattatacctctttatcttatctaatcttaattatttcctttcttctgcttactttaatttgttcttatttttctggatttttagaacagaagctgaggttattgacatgaaatttttgtccttgtcaaatagatatttagtgctgtaaatttccctgtaaatactgctttggctgcattccacaaattttaatatgtgtgttttcattttaattcaggtcaaaatactttctagttttcctttggatttcttctttgacctatggattatttagaaatgtgttgaggccaggcacagtggctcatgcctgtaatcccagcactttgggaggctgaggtattgagctcaggagttcaagaccagcctggccaatatagcaagactccatctctacaaaaaaatttaaaaatatatccaggcatggtgacatgtgcctgtagtcacagctactcgtaaggttaaggtgggaggatctcttgagcctaggagattgaggctgcagtgagctgtgattgtgctactgcactccagtctgggcaacaaagcaagaccttgtctcaaaataaataaacagagagagagagagagacacacacatgtattagtttccaaatacactgatattttttagattccttttcattatttatttctaatttatttccattgtggtaagaaaatatactttgtatgattgaaattctcaaatttaaatgaaacctgttttataattcaaatataatctgtcctgtatagtgttcttggtgcacctaaaaaaaaaagaatgtatattctattactgtttggtaaacggctctttataaaatgccattagttaggccaagtgagctgatagtgttatttaggtattcaaatctctgactataattagggatgtgtctgtatatttatcctcacagttcttttagtttttgcttcatgtattttgagagtgtgctgtgaggtgtgtaaacatttagaatttttatacatttttaatgagttgaggcctttatcataatgtaatagctctatttgtccctggtaatatttattgctttgacatataatttgtctgatattaatttagccactccagatatatttttattagtattagtatggcatttatttttattagtgttaattatttttattagttaattcttttactttttatctatttgtatctgtacatttaaggtagatttcttgaaggcagcatataattgagtcttgccatttattgaatcaggcaattgttgcctttatttagaggttcagaccattcacatttaagtaattattgggatagtttagtttaaatttactaccttactatctgatttctatttctatcaaaatttgtctcttctaatctttttctcttttccttttcgctgccttttttggattaactgaatatttttaatcattgatttcgtctccttttttggtttattagctataactccttgttttattttagccaattctttcaggtttagagtatatatctttaacttatactggctaacttgaagtgatattatgccatttatactatatatagtataagaaacttacaacagtttcaacaattctagctggggttatttgggttaataaaataaacatttatgcatctcaatatcgatttttcaaccccagagaggactctaagtggtcctgtttggattatgtgcatatccctaaacaaacaacagtggacaagggcatgaatgctttggtcaacctgaattcccgcagaaatttctgaaggaaattcataaaggtgggaaggagttcaccaaacaacctaagaaaaggaatgcaaaagtgcacggattagacaaaaactacagtgatcaaaggccactacaaccatacagatcacagaaagagtttatagatcgacagatagagaattcacatcagcttgctataaattcccaatatatctttctaacaataccatatttagccacacaaagcaggggtaaatgaagctttctttgtatggtgtttttcttccccttgtgctttccagggtacccagctgtcagtaacacttcttcacatctgatacctgtcaaggttaaaaaaaaaaaaaaaaaagccaaatactctgccaccctttatatttgacttttattatcattccagaaaacttttagtaagaatctaagcatttctgtgtaaatcagagttcctcaaccttagcactattgaccttttggactagataattttttgtattgagtggcttccctctgcatcatccctgagctctacccactagatatcagtaacacaccctcctccacagttgtgacgagcaaaaattcctccagatagtgtcaaatgtctcgttggggagcaaaattactcccggttgagaaccactgattgaagggaatgtttacaaacatcaagagctacagcttcttgacaacaaatcagcatcagctcatggggagaaagcagaattagcatcagatgccaatgaactcttgttccatatcccagcaagcccatatctcctcaaaacatagtgtctgttgtttaccactgatgatttagctcccagcatctggaaaaaacaatgctcaaataccacaaccacaacaaatgctaaaagaataggtgaatggatgaataaattaatggatggatgaatgagtgaaaatttaaaaatctggatgattattcacactgttgctcttgggaaatgaatgacataggctagtatatgtatgagaaaatgggatattttactattttacttgaaaatttctatattggaattttgtcattttaattttataatttagaaaactttaaaggatttattttacaagcacttgaaaataaaatcaagcattttctccttgagaacttttttaaaaatttgcttgttttcattagaagagtcaactaatatttattgagcatcttttattgttgaactaggggctgttctaggcagctgggatgcaacaagacagagaaagtttctgttcttatagagcttacattcctttttttgatacaaaatattatagatatatatggggtacatatgaatatttattacatgcatagaatgtgtcttcgtcaagtcagagtttttggaggatccattatcttgagtatttatcattcctatgtgttggtaacatttcaagtcctctcttctagctactttgtaatataaaatatattgttgctactatagtcactctactctgctatcaaatattggagcctattcttctatcaaactgtatgtttatatctactaaccaacttccctatatcccacctgccacccacacacccttcctaccctctggtatctactattctagtctctatctccatgagattaacttgtttagctcccacatatgagtgagaacatgtatctgtctttctgtgcctgacttatttcacttaacgtaatgacctccatttccattcctgttgctgcaaatgacatgatttcattcttttttatggctgaataatgttcaattgcgcatatatatatatatatatatatatatatatatagcacattttctttattaatttgtccgtcgatggacacttagattgattccatgtctttgctgttaagaatgcccctgaagtaaacatgcaagtgcaggtatccctctgatacacggatttcctttcctttggttaaatacctggtagtggcattgctggatcatatggtagttctatttttagtttttggagaagactccatgttgttttccatagtggttgtactaatttacattcacaccaacagtatataagaattcccttttctccacattgttgctagcatgttattttttgtctttttaataatagccattctaactgggataagatgatatctcaatgtggttttattttgcatttccctaattactagtgatgctgagcattttttcataaacttcttggccatttgtatgtatgtcttttcttgataaatatctattcatgtcttttgcccacttttaatgatattatttgggtttttaaaaattttttagttgtttgagttccttttatatcctgcatactagtccctcataggatgagtagtttgcaagtattttctcattcaacacattttctcctcactctgttgattgtttcctttgctgtgcatgagcttttaaatttaataaatttaatataatcccatttgtttattttttgttttattgtctgctcttcaggcaggccttagccatgaaatatttgcccagaatgatgtcttgaaatgttttctccatttttttagtagttttacagtctcaggtcttatgtttaagtctataatttttttttttttttttttttttttttttttgagacggagtctcgctctgtcgcccaggccggactgcggactgcagtggcgcaatctcggctcactgcaagctccgcttcccgggttcacgccattctcctgcctcagcctccccagtagctgggactacaggcgcccgccaccgcgcccggctaattttttgtatttttagtagagacggggtttcaccttgttagccaggatggtctcgatctcctgacctcatgatccacccgcctcggcctcccaaagtgctgggattacaggcgtgagccaccgcgcccggccttaagtctataatttatcttctgtttatttttgtacatgagaagccataggtatccagtttcctttttctgtatgtggatctccaattttcccagcaccatttattgaagaatgtattctttctccttggtgccttcatcaaaaatcagttggctgtaaatacatggattcatttctgtactatctatcctgttccatttgcctataaggctgtttttataccaatactatgttgttttggttactgtagccttttggtacattttgaagtcaggtagtgtgatgcctccagcattgtcgtttttgttcagaattgctttggctattcaggctctcttttggtattatacacattgtaggattgttttattaattctgtgaaaaattacattggttttttgatagagattgcattaagtctatagttgctttaggtagtatgattttgtttttttgtttgtttgtttgagatggagtctcgctctgttgcccaggctggagtgcaatggcatgatctctgcttaccgcaacctccacctcccgggttcaagcaattctcctgcctcagcctcctgagtagctgggattacaagcatgtgccaccatgcccggctaattttgtatttttagtagagatggggtttctctatgttggtcaggctggtttccaactcctgacctcaggtgatccactcgcctcagcctcccaaagtgctgggattacaggcgtgagccaccatgcccagccagtagtatggtcattttaacattattaattcttctgatccatgagcatgggatgtctttccatttgttttgtcctcttcaatttcttcattagtgttttgtagtttttcttatagagatctttcaacgccttagttaaatttgttcttaggtattttttgtagctattgtaaattggattaccttcttgatttctttcttggctagttcattatcagtatatagaaatgctactgatttttgtatgttgatttgcattctgaaactttactaaatttatcaaatctaagagttttttggtggagtctaggtttttccataagatcatatcatcagcaaagaaatggttgacttcctcttttccaatttggatgccttttattttattatttcattttttttaatttgttttcctcagagatccttgttctgaatgatgccttttatttctttgtcttgcatgattgctctggctaagatttccagtaccatgttgaataagagtggtgaaagtgggtatttgtgttgagttacagatctgagaagaaaggctttcatcttttcagtagtagtgttcatactaacattcagtatgatgttatctgtgggtttgtcatagatgacctttattattttgagacatgttccttctgcacttggtttattgagagtttttatcatgaagggatggtgtattttatcaaatgctttttctgcatctattgagatgatcatatgatttttgtccttgattttgtttatgtgatgtatcacatttattgatttgcatatgttgagccatcagtgcatccctggtataaatcccatttggtcatggtatattatctttttgatgtgtgttggatttgacttgctagtagtttgttgaggatttatgtagttttcttttttgttgtgtccttgtcaggttttgtcactgggataatgttggtctcatataatgacttgaggagaggtctttccactttcgttttctgaaatggttttaggaggatttgtattagttcttctttatatgtttggtaaatttcagctgttcatccatccagtagttgggttttctttcttgggagactttgtattactgattcaatcttgctactcgttattggtctgtttaggttttctattttttccttattcaatcttggtagcttgtatatttccagaaatttatccattctcctaggttttctggtttgttagtgtacagttattcataatcgtgtgtgatgatcttttgtatttctgtggtatcagttgtaatatctcccttttcatttcttgttttgtattctgtgttcttggttagtctagctagtggtttatcaattttgtttatcttttttttgaagaatcaacttttcatttcatttattctgtgtattttttagtctatctcatttagttcagctctttattatttcttttcttctaattttgactttggtttattcttgcttttgtggttccttgagatgcatcattgggttgtttgtttgaaatctttctacttttttgatgtaggcatttattgcctatgtcaaacttcctcttaacactgctttcactctatcccattggttttggcacatgtcttatttacatttgtttcaagaaattttttgcttttcatcttaatttcttaattgacccagtggtcattcagaagcatgttttttaatttccatgtatctgtaggtaccagagttcctcctagtattgatttattgttttattccattgtgacctgaagatacttgatatgattttgatttttaaaactgttgagaatcgttttgtgacctaacatatgctgtatcctggagaatgtttcatctgcttagaagaatgtatattttacagttgttgaataaaatgttctgtaagtgtgtgttagttccacttggtctaaagtgtagtttaaatccaattttttgttgttgttgattttctgtctagatgatttgactaatgctgaaagtggggtgttgaatttccccaatattattttatgggagtctgtctctctctttagctctagttatatttgctttatgaatctgggcactccagggttggatgcataaatattcagaattgttgtatcatacctcttgctggattgatccctttatcattatataatgaccatctttgtctttgtcatttttactgtttttgacctaaagtctgtttgatctgatctaagtatagctacttctgctgactttgggtttctgtttgagtggaatttttttgcatccctttactttgggtgtatatgtatcttgacaggtaaagtgtatttgttgtaggcagcatatagttggataatgttttcttatatattcaaccagtctatatattttaagcagattatttaatctatttccattcaatatctcttttttttttctttttgagacagagttttgctcttgtcacccaggctggagcgcaatggcgcagtcccagctcactgcaacctctgcctcccaggttcaagtgattctcctgcctcagcctcccaagtagtttggattacaggcacctggcaccacgcctggctaatttttgtatttttaggaaagacggggtttcaccatgttggccaggctggtctcaaactcctgacctcaggtgattcacctgcctcggcatcccaaaatgctaggattgcaggtgtgagccaccatgcccggcctcaagattgcttttaatatgcaaggctttgttcctgccatgctcttaattgttttctgatcgttttgtatgttctttattcctctctttttttctaattgtcattttggtttggttgttttctgtagttgtaccatttgaattctttctcttcctcatttgtgtgtttggtgtaccagtgagttttatactttgatgtgttttcatgatggtaaatgttatcttttttattccgggtttaggacttctttggatatttcttctagggccagtctagtggtgataaattccctcagcattttcttctctgggaaggactttttttgtgaaggataattttgctacatagtatatacttaagtggctttttttcttcaccactttgaatatgtctctcttgccctgtattgtttctgctgagaaatactttcttagcctgatggggtttcctttataggtgactagacacttttgtcttgctgttgttggaatcccctctttatctttgactttaagtagtttgactataatacgctgcagagaagaccttcttgctctgtatttgtgtggggttctctgagccccctatatgagtcttttctagattggggaagttttcatctattatttcattaaatagattttctaatcctttcattctctctttgcccttggggacactgataattagaatattgagtcactatgttgtcccataggtcacaaagcctttctcattcttttttattctttttatttatttttgtctgactggattatttcaaaagatttcaagttctgagattctttcttctgcttaatctaatctattgttggaggttttgactgtattttgtattttattcaatgaattcttcagttccggaatttatgtttggttcttttaaaaaaaatgtgtatctctttgatgaattcttttccaattttctgtattgtttttcaaaattatcttgtttgctgagcttctttaaaatcagtaatttgaattatttacccatgatttcattgattttttattggtatctgttgctgtagaattattgtgttcctttgaaggtgtcatatttccttgctttttcatgtttcctgtgtccttatgttaatatctgcacatctgatgtaacaatcacttattccatgttttttaaatttgcttttgtagagaggactcttctctgaagattatctatgatgttggttgagtagggcactttggctttgattttggatgcaagcaatagcgtagtttctgtatgatctccttggctataaatagtatcagtggtatctgtgatttatttccttgatagcttagggtgtggttattagtggaggctgtggtaaagttttctgggaactaggttattaggtaggccagtggtacagcagtggtctgaagatgcctgtctttgagccccagagtgatgtatgctggctctggtattagtgggtccaagtgggccaattactgggcttccaggtggcttgctgaaatgctagtagtggcagcagtgggcctggcatgtggactggttctcttgcccttggtcagcagacttgatgtgggcaatggcaatagcagtgattgggccactcactgaaatccaagttggtctgagctgtaatgggttggatgggccagtctcatggtgcttgcaagtgagtgccaattgtggtggttatcagggggttgagttgcccgcacctcagaccctgggaagagtgcacatgtgccaacagtagtggactaggctgggtgatttccaagcccctggatggcatgctcaagtactgagaagacaggactaggttggcagaattgagacttgtcctcaggtcccctggtaatatgttcaggcatggctatgataggtaggaacaaggtggtccccaggcagtcagcagaatgctcaggtgagggcactggtggcttcagttcagggctgccactggggagggcacagacactctcattgggagcagcataggtaggtagttgtgcagcatgtgatttgctcatgcctcagtcccccagcagcttgcagctctagtgacagcgggatttatccttagggtacacaaaagtatctggcctcatctcctccctggcctggtggtagcatcagtggcatcaaaaccagggcaagacatagtcctttaggggctcggctttcagaatgtcactgtgctgctcagggcttacaggcctgtgggtcacagcatgagctccctctttgaagcaataccactgtgcaatttctaggcagctctctgtgttagtctctaggcctgtgaggatcgaggggctctcctgtcagtaagatagtatgtggtgggaatgtggaccctgggaggtctctcacttaccctttccctgtgttagggagcttctcccagctcccagccaaaccccccgagcaggctacattgcttccatttcctctgttacctttggtgcttcctgtcacttttttgtggaattccagtgttctctcttagatgatctattccaagtgtgaatatctacttgctattttggttcttttccatggtagaggcacatagctgcctgttgtttgtttgttccttttttttttttctttttaagagacagcatcttgctagattgcctaagctgtacttgtactcctgggcccaagtgatcctcctgccttagcctccagagtagctaggattgtaggcacgagccactgcacccagctaatttgctattttgtaaagtacaaatatggacttttgcctggtttacattctgaatataccatcaagtctgaggtttgatttttttctcttttaacttatgagcaaatagccatattgtataaatatttttgaatgggcttatgtcggaggaaaacaaacaaaccaccatacctagcatggaagtaatctgacacatcacatttaattatgtgcctcagccttgagggcagagattagacggcatgcattttcacatcccgaaccttacaaagtgtgtgcacagtgcgggccctcaggaaatgtatgttgaaagaattgattaggaagtttcataggcatagttttggttaattctgtatttactttgccaaaccaagattttctgagaaggatgaggggagaggagagagctaggtgccgtgaaaagccttttaaaggaagaacagaagttgaagagcaaagtgggccagggagtcaggaaacaaaagggtgatgtgtggggacagctgtggtctctctttcctttctgccaccagcaggaggctgggtcaatccttccctcttcagtaagggcagacactgctcctgcaatggggaacccagcactgcagaacaagccagagtctgctgtgtgtaaaacctccagtcgtatagaattctagtccccaagcccccatatctcccaaaaggggaatgcccagtcacatgggtcccttgaggtcatggctccaggaaccagcaaagcctagcttgcaaggagaggtcatttatttacactgggcaagcaatgcatgatgcaagaagacacagagtctgccttagtgaccaaagagatccctttgcctcattctcctgtggaagcaatcaagaaagggaggttgggcgaggtgaccttccagagccgaatctgtgcttctaaaaatagaagcatccttggagaactgagaaggggagggaaagctttggacattgagggcaagaacctgaatccccagagcattgtcagtaggaaactgtattaattagacacaggcacctcagctcgataacctcaggtatctctcagaaattgaaacgaaatgaaatggctttttttccctcctttctggttatactgtccctgagctaaaaaggagaaagagaattgtgtcttctgacctatctgaatggctgcacagtgcctgagatatcttccccagtggagggaaatggggagtctttagaggcacgccagcaaaagaaaagagctgctgcaaagtggaactgtgaaaggcaggcagcagggccacctgggggtctgggtctctgttctctccctgcaaggaggctgtgcgggactaggcgagtacttggctgtgtccagggctctgaatgtgtgggctcgcagggtgccactctcaggctcatgcagtgtccttgtttggagctatgcgatagactgtaagtttccagggtccagtggagccgtgtgctggtctgcacagatcgtatgcagccagggtgtgtgctgagctctgtggcatggggatcgcgtgtgggagattggaggtatgcaggagtacacagggaggatatggtcgcaagtttgagggggctgtgtacgggagtgtgtggggtggtgtggaaacctgttgagaggcttcatgatgctgcatagggctgtgtgcagagctaccctgggccgtgggtggggcactacagtactggagggcacctgtttgtgtaactttgacttagaggctctgtgtgcattgtagtagtgatatgagtggagccacataggggagtctgtggaggatttgttaaggctgtgagacttatgcactggaggatgtgttctgggctacctggacacatgagtctgtacagggctgccggtgactggatacatggtggcagaggcctgaacagggttacagctttgccatccaaagataggctgtgcctcctcagggtgaggtgctcccaaagtgcagggatttattattctccctgtgactgacatgaacggaagagataccagggattctacaagctgagcaaaaggggcagtgtgttccctttcagtgtggcctgaagctgagcctcttgcacaccaggctggagacactttctaatactttagtttgtgctttctcaacaggacaacgtggatctgggagagctgatgttttccctgtgctatcttccaacggctggcaggctgaccattaccattataaaagcaaggaatttaaaggcaatggacataacaggagcatcaggtggggcattttcaaattcagacttcctcatgcacttctactgtagtaagtaccttataaagttttagtatggtaataaagcacattgactctggaaccagactgcctaggcttagccctagtcctaacacctgtgtgaccttgggcaagtcattttacctctctgagctttggattcccatcggtaagatgagagtaattatagcgtctggctcaccgggctgttgtaaaactgaattcataaatataaagccatgagaacagtgctagcatatattaagtgctacatattgttaattattgttattattacatttagccttctatatccaccagttccacatctgtagattcaaccaacgatggattaaaaatactcaggaaaaaagtaatacaacaataaaaataatacagttttttaaacaatacagtataacaactatttacacagcatttatgcctgattaggtattgtaagcaatctagagatgatttaaagtatacgggagaatgtgcgtaggttatatgcaaatacgatgccattttatataagggacctgagcatccttggattttcctatctgtgaagggtcctgaaaccaattccttgtggataacaagggacaatagtactctcttgggtctccctcaccataattgtgaattggacctaccatttacacacactgataaagcttatctaattgggtctttcctcaaatatcatcatcccaggctcattgaagactgagaacaatcctatgtccttattaaagggaactatgaattttagatttttccagtaaaccaagcattaaattctgaactctaacaagaaaaaaaaaatgcctctatatgcattgctaactgtgcaaattcacaagcaacctctgcaggtgtttcccaaatgtggtcacaaaacacccagtacaccctggcttacatcctctgaaatcaaagaacatcagatgcaatatattctgcatcctatatcccagtgtttttgtttttttaagcagaaagaaaaaaaagctgtggtccctctggtcatctaagtccctactggactgcatataggagtcagagcaatgcatggttatgcaggtgaaaatagaacaaggacttcccaataaacagaagaagagtgagatagctgttaggaccagaagagccctatctggagcagaggccagccttgccacctgttaccccatcacagtgttgcaccccaaggaagcctgtggcctttctctccctgatatgctgagctgcttctccttttgcaacccaagggcaggccactctaggggctcaaggtctctatacttaaggaattccactcccagatgttctctgtcctctaggaattcagaaattcagagtctaggaattccctttcttaaagacctgaaaagattccctgaggtggctcagagctggggggcctgttttcagccttggaaatgctggtgcatttctcttgctatcctggccaggccagtcttgagttctagctggaatgtctcctaattccttaacagatgttttcaaactatttttaaattacacacattttcaggagacagtatcctgtgctttttcttgaatgagtgacttaattatcctaactagttgctccccagatatcatattaatgacagtcctccaactccagtccacaggcaggtaaaggagttcagcataccatagtccatgaaaactcacagtgatataactgcccacctaaatctatacgtatcctcacagtactcctgcttctcatggtctgtccagatccctatgtgaaagtctcgctgatgtgtgatggcagacgactgaagaagaggaaaacatccaccaagaggaacaccttgaatcctgtttacaacgaagccatagtctttgatgtccctcccgagaacattgaccaaatccacttgtccatagcagtcatggactatgaccggtgagatacctggaactcttttccagtgcaagttcactgtgcccaggactgggaaggcagagggggagcagcagccacagattcttacctggtgtcccaggctgcaggaaatgagtcaactagcagtgcatgggaagcacattgacaggagtcacctctaaaccatgctgtagagtcagactaccaaagtgtctctcagcactcccattcttttctgccccgttctcattttttttcctattcctacatcctcccccaacctccacctcttccccttttcatctttgcacaactcctagaatctcagcttggagagctgtggccccacaggttttatcttctgtcaggcagtgctaactgcccttcattggaaggattccactcaaaatggcagaatgattactttcgccagaccatcaacatttccaaatacataacttcaatctttttccttctcacaagtatttaataaagattgtttccttctacttaagtctgaaaacaaacacagaaatgttctcctgaaagtgctagaatcagtatggatgacaaggtacattaaaatgtataagatgctcaactttttaattaatacagcacagaagagatatttatagcctgcattgtagccaattgtgtatttaaaggacagatttgaaaaacagtcattttaatatgcaaaggaagtaccaacagggaattatacatgttaaaccagtcattagactaaaatgcaaagtctctctttaattggaaacctcccacgtggtctggacacaattattaaaaaaaatattctgacttctaatattatttgtgactaagaattttcccacatacctctgaaatatcaggaaggcagcttcagtgacctgaacactctttccagcagatgcctgcgtgaagcatgacagtcttccaacccaaggagcacgtgggttggctcagctgcccatgagtgtgacagcccatgctgagcagtagaccttgtcccatctcctgtgggcaagaaacaacaccaacagtgtcaggccccagtaggggacattgcccaccaactgtggaagcctaggccagcaatttttaagctattgccaagtttcctgcatggacaaatctgattatgtgagctctgccttaatttaattctcagtaaactcatgaatctggcctggaaaaattcatggcagaattcatggggcttctgcatgcatttgattttaatgggcagagactcaaatatccttcacgtgacctccccaccctcatctcacctttatgctccatacacaaataggagaaaaatcactcatctttgcaggagggaaaaaaaaaagagaaagtatgtgagtttggatcccatagaattaaagaattggccatatcagtccagttataccagggactttttaaaaaactgctagagaaaacaaaaatgtctcaaggcggggacctacctagggagagtttcagaaatattagccttggccgggcatggtatctcacacctgtaatcccagcactttgggaggctgaggcaggtggatcacttgaggttaggagttcgagaccagcctggccaacgtggtgaaaccccgcctcaactaaaaatacaaaaattggccaggcatggtggcatgcacctgtaatcccagctacttggaagctgagacaggaaaattgcttgaacccgggagctggaggttgcagtgagccgagatcatgccactgcactccagcgtgggtgacagagtgagactccatttcaaaaaaaaagaaatattagcctcaaggtcaaaggagctatgtatctttctatagttgggaaactaactgggccaaagaagctgaacttagaagaaaggagggacaagtataagacaataacagtattctctaaagagaggaagcaggaagatccataagcctccttcacttaccttagtttgtgggctgaagacccatggctgccagacacaaaactgctccctcacccatgcttggttgcctcttgtgggaattagagcagccattattgcaagaaactcatttcagatgactccctctttattacatggaggccagcctagatccaggacgagaggtggcatccttagcacaaatcgtggggttctttgaacaaggttcttggaaacaagttgacccatgtcagttttaggacagccagggtatacgttagatcccaagtcctattggccgtgaagcttagcctgtagttttaagtgaggaaatgaaaaaacaaacaaacaaacaaacaaaaaaccacatccccaattccttcatcagtttaattgagtagctattgatcttacataccaaaattttaagaaaaaactattgtgggccattttcacagtgtaggtcacaatgagatcatcggcgtgtgtcaagtaggcaacgaggctgagaggctgggcagagaccactggagtgaaatgttgtcatatcctcggaagcccattgcacactggcattccctggtggaggtaagaccctaatccacatgctccactttgcataagagtaaatgctttactgttgaaatgcaggagctgccaaacatatgagtgcaccaggatctatggtcatagacgggttttcctggttgcatttcctggggctgttgggacttgcattcaatttgaggctgaatctgtgcttcccaccagtctggtaggttttgagtattgatcagagatcatccctcattttgattgtatttttaaaagatcaagattctctgcttctgtgttaaggctttgggttggtacttggagggcatctgcaaggtgtgggtgagtggggactttcaggccttcgtacagtgacttgagactgactttggaaaaaacataaggccttgattctaagaccagctctggcaccaacctgtgattctgggcaagtgggttagtatcaggttcaactacatataataaaaaccaaaacaaccaattataaattaaaaacaaatgaaatgagaatttatttctctctcttatatacaaaaagtctagaggaaggcagtctggagtatcttagcagctccatgatcaacaagagacctagacttctgtctttctgcctcacagtcccagtgtggctttgttccttgaagtcccctcattatacaatatggctgctaagctccaaccattgcatattttctaggccacaaaaatgtgcaaaagggcaagagccaaaagggcacacattccctttttgattctctttgaattctcatgcaagactgctatttacatttaatttagtcacaaaacttagtcacgtggacatgtcaagttgcaggggatagttggaaatgtaacctttttgttgggtgtcaatgtgtccaactaaaaaccagggttctgtttgcagagaagaggaaagtgaaaacctggagtcaaccggccatcattctgccactcacatcctcattcattcactccctccccctttacttctcattcattcttcccctacttatctttgctcattgattcactctcttatttattcactaacttgttctctcaaaaataatttgcactccctaagtaacatgtctgagggtccaatgctataatagctacagaaaatacagatatgaataagaaacagtcctttcccttgtagaacttacagactgtaaaataaacaaaagatgacatgtaaactaatcttcgagaggcacaaatacaagcatttccatccatataaagtgctacaaaagcgcaaaggagagagatgtttactgtgcttagaggagattgtgaagcatctctccttcatgctctcaataagtaaagagaactgagcccccgggaactggaaagccaggagggcagcagcagttatttactgaggatgcgtgggttccaggcagagagctttcctctgttctcctggtgcaggaagctctcttccatgcaaagccatctgagaggccaagactagagcctcacccagtgtgggcacccctgccattgatagtcaggtgagtctggttgaagtgaacacagggcggctgtggagaggcagagaggcagagaggccccaaacccagacaggggaaccaagggacatctttgttggaagtggggcaggaaggagaaggcaggacagggtttatggattctaaccatcagggcacccagatgtattcaagaagagcctaggaccccctaatttgcgggttcttaaggatagttctgcccgtgggccataggagcaaaattgatccctaagggagacccacaggatctatgagccacttgagaaggagctggagactggtgctcactgaactatacctcacttcttcagctcctggtggaattctcaaaggagtccatctgtgggctcattagattttgggggcctgtcactagcagtggcatttagaagagttgtaatagactttttgcacccttatgagccattgctgactttaattcttattggtaattaggagtatcagagagtgttaaagctctgtgcttctcaggaaacaagaaatgagaaaggagtaaggatgaggtgtgtggtgtagggctgagaggtgagccctgattcatgcacaagcagttttttttcagtgacctgggcaggggagtagtcctgggtggagtgttgcacacgggtccctgagtggcagtatatgcacgtgttacacaaaggagagtgcagggagcaggccttggaggccttttccttcactgtggagaaaaagtgtgatataaattcattcacctgagagatattcctcaaaccccaaacactcagctttttggaaatctgtgctccacagttatgtaactgaaaagtaaatgccattagggttaaaccactgaaacttagaagtcatttgttacagcggctaaaattactttggccaatacaatggtcatttctgaactgttacagcagaactaaggaaatgaaatgcctgtggggcttatatgaagggcaagccttcatataagcagggggagggcaaaccttcctataagcagaggcagagggaggctgcctcttccccgttgcttcctgtctctttgaagtacacgtctgggactccagatccatcctgagagaggaagtgatgctttttcttttaaaaatgaacattgagctggcagaattggggcaatggtaccagatgagatgaaaaacagtattggagaggttggccatgcttcgttagcagctgtaaggatggaggaggcaacaggcagactggccagaaacattcactttggagttggaaggacctatattcgaattgctgtcctgccactcactagatgtttgtttttccccttctgaacctcagtgttctcatctgtaaagtggccataacagtgcttgtctcacaagagggatggtgaggattaaacaatctatttatatgaaatgcagcattgtagctgatatataataaacactcagtaaagttttcagttatagttgttattatgtatgccccacattctgaggggctgctgtgtgtccttatgggcctatgtcctgtgaagaaatatcatccatgtgtgtcatggagaataagagaaaggccgggaatccaccactcctgcaccccagtgagccatcatctcagagtggggggaaggggtcatccagtacttggctaaacacagatgcacatatttaagttttgtttctttcctcttttccttggccttaaagacaggctgctgttatgctctctaagaaccttttaaatgtcttctttaaaacaaaaaccagcaattaaatctcagtgctcatgataacagagtatgtgagtgtgcactcatgagcatgtgtgtatggaagacagagagagagggagagagaacgaagatgggggccctgggatttagcatggagggaggctggcctggcagaagctcttcactgctgaggaattggttaggtctaaactctgagccctgcagagatctggcagcctgctcagggttgcatccaatacaccctgaccttgccagggcaggtggcagatggaatcttcaaagccagtgagttcaaaaatccgtttctctcgcaggaattctggatgaattcactgcacactcaaaggtcagccagtagggctccctttactccccatgatgccaaaggtttggaaagctgtgaaaactcccccaagcagactgcctagggcttaggaatcggagcaccccctccatagggcctcagatgacagagctctaagagctcccttagcacggcaccctcctccaccaattcaagagaagatggtttcggcctggccatatcacaacacctttcctgcctcctgtatgtcaagatgaccaacatcataagcctcatggagaataataggaaatagttccaagttttcatcgcttccctgtgtagtgccatgtaacatctgttgtatgaataagtactaatcttggtttggtgggaagacgagacacagacactatctggttaaatgaaatttcacttttctaaaagaagaaagagaatccgatcagaatatatagtcaagatcagcactattatcctataggcataggtgtaggattccaaacaccaaagttctactcaaggcgtgccccattttggatgtctgcctcactccaagctcaacctttgtgcatacacgtacatacagctacaaaagttctgcatgtctgactgtctgctgggaccagctcattgagcctcctgcccctcttcaactcagaattacataatgccaagtataaccagaaggcagttatggtacaatatgcccagacataaacagagccctcatttatcaccctcagcctctagaagggtataaacttagagtcaaaggactacagcaactgtcagttacccagacttgtagttacacaagcagcccgtgtaaaccatctctagatattatctgtcaagtgtccagcagggcctatctggagtcttggagatccacatattcccaggagaatgtatctgattgcccaagatttgattaggtgtccatcccggtgcaatttgctgtaggtctggggtcatgaaaatgtgacctggacctacctcagcaggagttttgggagtagacttcttgagaagagtccgcacaggacagggaaattgtctaaaatgaacatgaatgactgtttcccaaaggaatttaaagtgaggagtgagaggctttagcactgtggccaaattgttattcacaacagatttaggaaaggagcaattcaccaggaaagatgggagtggggagagcatggggtgactgggaaaagccacgtaggaaatcaggttcccatcaaggggatttgggtgtgttgcagggcttgggtcttgttgagaaccagactagcagggaagaacactgagacaagacaaaaagaaaagcatggactgaaacgtacaatagggaaagtcctagaaagtgctgctactcagcaagcattaaggcccccaagactgcaggtctttggaaacacctgaattccagacccctgtcagttggtggggaaccaaggctgccaattccatgcattgccctctgaaggagtggcttatgggctagataaatgaacatagcaaaagcctaatacgtgtgttaggggatggcgaaagagaagtgagcagtcaggacgtggagggctacatgctgctgcaatatcttgcccatatgatgaggtgctcccccccaatatagtccagcatcgtgtctcatgtctcagtgtctctgagaacaaaatttttgttatgaatgaaaacagaaaaaacaagaaacatttaaatcacattaaaatagggcaagaaaacataaatttatttattatctgaaaggatacataccatcttggtaagaaacaggaagaggtaaatgaactttatcttgctaattagtagttctcggtcttttccaggttatgtcagtctctttgggataattattttctcctcttcctaggagtctcctctctccttccttcctccctcccagctaggtatagggaagtacaaaggctacctcgtggcattggctggaactgtgcatattgttctgcttgtctttgggcatcagacttcatcatcactacctctgctgctgaggatcatggctggtgtaactgtgggctatagtctcagcatagaaacttggccaccttgaggctgatgagaccccacatcagctgttgaagtccctgtggatccctgagggcaggtagcacctcccactcaatgcttggcctgggagcttttctttgcagcccttaatacagagtcattccccacttggtggaattccctgaaattctaacaaccaatactctcacatccttcaggcatttgggcacacaagggagccacaggagactcagtgccatcacaggcatcttcttcatgcctataaagttacatggtcatttctacattgttcctctagcctgtgttggcccaggggtcatgtttgccttaagcttccccctcaatccatctaaacttggggtttcaagcctgaacggtaaagccagaacctctcctcctctcttctctgtatctcttctgccaaagggtctctgcttcctctacctgtctggtggaaacaatatatatcttagcatgatttccctctacctatgactcacgctcagacctccaaggtttcctctcagcatgtaaggaaacatttggaatttggatcccctttttctcaataaggcctggctttaagataaagttgcatggtcatttctacatgtaacatgaaataagatacttatttcataggagactagctgatcatttaccttgagttatcagccctcagcttccaagaatatatggcgtttattcaatgcatgcattttctgatttacagacaataagaacattatctctgttacgtaggtattgagttagcatttggtgaacaaatgaaaaaaaaatgaatgaatgagatatatatagaatgaattgagttcccttcgttctaaagttccagaattcccatgcagtggagtacacagtagaagtcagttcagacaaggtgtaaaaaggtattgagaatggatttgtattaggctgttcaaatagagatggcccttattaagctccaagttttaattaccttttctctatttaggagaagaacatgaaaagggaccaattcctcccttggttccaataaactgccacgtaatgacaatggctttgcatttttgaataatgagaaatattcagaactgaggccccttagtgaatcatgagggtccccctctacttgatgtaggcagccaagtcctagagcgctcaatatgtcctttcataagagagaagaaacacacagagatcccaatggtgaatggcagactgctgtgccctaagtgaaaactgatcaggaggtgacaaggactttagcccacaagttgacctttctcactaggaatatattttagcagcagttttacacaaggtaatgctttgccccatctacctgtgaagataaagaagagaaaaataataggaatggggtattttttgacaaaatgaagaaattattcttcagattttgttgtaaaaaataaactattttgaatggtgagatttagcatgccagcacgcataaacacctgcagggccgctgaagcaaaactgattgcagagaacataaaaatctactacaagtttaggatctgaaaaacattaacagacctgttagaatttgtgtcaattgctgtaagtggccagaatgctgtttggacaagcaggcactgttagtattagtggggcattgtgtttccagctggtagaggttatggttaacaaacaaagctagggccattcagaccttcccaagcaaatcttctttcttgtattgaattatctgtagaaaaaaagagagagagacggtaggcattttctcatctttgtcagggatgggtgacttttgtgacttttctgaaggtttgtagagatagtaatcatacaaaacataggagtacttagggtaaacactagaggtataaaagataatgacaatgtggtagaaaataacatttctgcctgaacagaaagtcaactgcatcttgactctcctgtcattacagatgaccttgctccagtagtcactgccttggagcatccctgctgcacacttgaatagctattaaataggaaggtggatgacaatgggcttgagccatcagctgtctccatctccagggatggcattcagaggtgattgctaacatgataggccagttctttccccgcagatgaaatgaaccagagtggtttatgccactctctgaaagaaacacactccctcctgatagtgtggtgggaggaagactgttccctcctggggaatggggcctggggcaaaggcggagcaccctggcagaggacactcaggaagcccactgctcctggatatgaatctttcagaagacgcacttgtcaaatgctgtcttccaaacatcaccagaacaacctattgataagacaaagctgagtttattgctttcccaggtaatggaaggggaagggcagagtctcatttgttgagactttgaagtgtggtttaaggtgggtctctccatgtgacgagggagatgaagtggggaggtggggaccttggttaggtttggatcagtgtcatgatataatagctgaggtggaacagcaagttgaggattttgagcctgggattcaaagagtcttggggtgtaaactgttgatgctttctaaggaatagaaattgggaagtcccatgagtgaatacttaagttgtagtaatgaagacaatagaatagtacagccaaattaatggagggtctgtgttggaataggtggttttagtactcacactccagcaacaaaaagcagaagggaacctcacaaaagatcctgcccagtcctgtgggcacccatacaccgacagagtgaatatttattagttgcctctccagcatcaagccccttttctgatggccctgatttctgattaatgattctagggagcctggctccatccttgtctctggtgatggtacatatgacagttccaggctaaacctgtcaagctaaccataaggattaccactgcatacgctgattcagtccaagagtattataaaacatttggtgtgaatgtttggacaaagatgctctctctttcttgttggatataaacaaagcactatataccctgggagcagctgtggcttctttggatctctatagaagatccaggtttagggagaaaccaagcccatagatacaaagaaaccagattctcagtcatgtggttgagctcctaaatcaaacctctcccaaacatagtgttacctctggcctttataagtatgtaaacgtatatattcccttggttgtgtaagcaatattaagcagaatttattttatttgaaatgaaaaacatcttatttaggatacaggtgaacactcacactgccccagttggtgttctttgggagtgaagagaaccattcccaaagctgtcgcgagatcagctcttctgcctggctcactgcggtatgtccaatacctaacaaagtgtgtggcccacagtagactcccattaaagttttcctaatggagcaaattattaatgttcagataattaacttgtgtgttaaaacaagcatggtgaaaagagggacacttgactctcagtgacatacaaatattatataaggttaagaaaaaaactattttccttttgcatttatatgttattcaaattctacatggagtctcagggcctgtgggaagctcttcattttatgatcactcccttgagctgataaaggcacagttcctcaggagtgaagatcagtcacatagctgtcctttcccttcaatgtcttatgtgatgtactgcaattcatttatttacagcaaaaatgaagatctacactcttttaacacaataattttagcaattctagtattatttttatttctacgttatctatttttatgtaaaactcaaatgtatatttaaagtcttcagtcattggtggtagaattacatatttttttcgcaccttagataaaattcaggatgtaaaatgtgatgatattgataatcaaaatgcttgaaataaagaaaagagggtttctataaagcaaggggaactttaccattcattgagaaattatataatgcaattgtaacttttaggtatatggtacactatgatgagttatactcaaattgtcagaaacagaagcagttatgaataaggcaggaaaacaatagggtgattttttccttcatagcttaggatctgaatggtgtgtgcttagatgctttacatattaatagtaagtgttcatattagtaaagtttactaaagagcggtcataaaaccaattaatatggtttaaatatttgtccctgcccaaacctcatgttgaattgtaatccccaatgttggaggtggggcctgatgggaggtgcttgggtcatatccatcatggcttggtgcggtcctcttgatagtgagttcttgcaagatctggtcatttaaaagtgtgtggcaccttccaccctgccttgcttctgctctgccaagtgagatgctggctcctcctttgccttctgccatgagtaaaaacttcctgaggccccaccagaaaccaagcagatgtcagtaccatgcttttggtacagcctgaagaactataagccaattaaacctcctttctttataaattgcccagtcccaggtatttctttatagcaatgcaagaaaagcagtaccagaagtgaagtggggtattgcaataaagatacttgaaaatgtgggagcagctttggaattgggtaatggacaaaggttggaagagtttggagggcttacaagaagacagaaagatgagagaaagtttggaactctcttagggactggttaaatggttgtgaccaatatgctgatagtaatatggacagtgaagtccagactgatgagacctcagatggaaatgaggctcttattgggaacaagagcaaaggtcatctttgttatgctttagcaaagaactcggttgtattgtgtccataccttagggatttgtgggagtttgcacatgagagtgatgatctagagtatctggcagaagaaatttctaagcagcaaagcattccagatgtggcctggctgcttctgacagcctaagaaatgacttaaagttggaacttatatttaaacaagaagcagagtgtaaaagtttggaaaatttgcagcctaccgtgtggcagtaaaagaaaaagcttttcaagacagaaattcaagcaagctgtggaggaaccacttgctagagatattggcataactaaaagggagccaggtgctaacatccaagacaatgggaaaaagacctcaaaggcatttcggagaccttggcagcagcccctctcattacaggttcagaggcctaagagtgatgaatggttttgtgggccaggaccagggccccacggccctgtgcagcctcaggacactgctccccacatccctactgctccagctctagccatggctcaaaggggcccaggtccacctccagctgctacttaagagaatgcaagccataagcttgggcagcttccatgtggcattaagcctgcaggtgcttaactgtgggtaccagagtgaaggtttagcagcttctgcctggatttcagagggtgtatgagaaagcctgagtgcccaggaagaagcctgctgcaggggttgagccctcccagagaacctctactagggcagtgctaagggaaaatgtgggattggaggtcccacacagagtccccacaggggcagtgtctaagggaactatgagaagggggccaccagcccccagacctcagaatggtagatccactgacagcttgcaccctgtgcctggaaaagccacaggtattcaaccctagctcacgagagcatccctgggggccaaccctgcaaaaccataggggcagagctgcccaaggccttgggggcccaccctttgcaccagtgtgtcctggatatgggacatagagtcaaggattattttggagctttaagatttaacaacaatcgggcatggtggctcacgcctgtaatcccagcactttgggaggccaaggcaggtggatcagttgaggtcaggagttcgagaccagcctggacaacatggtgaaaccctgtctctactaaaaatacaaaaattagctgggcatggtggcaggtgccttcaatcccagctactcgggaggctgaggcaggagaatagcttgaacgtgggaggcagaggctgcagtgagctgagattgtgccattgcactccaccctgggcaacaagagtgagactccatctcaaaaaaaaaaaaaaaaaaaaaaaaaaaaaaaaaaaatatatatacatatatatatatatatatatatatatatatatatatatatatatatttaatgactgccctgcagggtttaaaacttgcatggagcctctagcccctttcttttggtcaatttctcccttttggagtgggaatgtttatccaatgcttgtacctctattgtatcttagaagtaaatgacttgattttttatattacaggctcatgggtagaaggcacttaccttgtctcagatgagactttggactttgaacttctgaattaatgctggaatgacctaagactttgggggattattgggaacacatggttgtattttgcaatatgggaagaacatgagatttgggaggggctggggtggaattatatagtttaaatatttgtccctgcccaaatctcatgttgaattgtgaaccctaatgttggaggcaggacctggtgagaagtgtttggataatatccctcatggcttggtgctaccctcatgctagtgagggagttcttgcaagatctggtttaaagtgtgtggcacctccaccccccttgctcctgctctgccatttgccacactggctccctatttgccttctgccataagtaaaagcttcctgagacctccccagaagccaagcagatgtcagtgccatgcttcctgtatagcctgcagaactgtgaaccaattaatctgcttttctttataaattatccagtcttggatatttctttataccaatgcaagaatggactaatacaccaatcaagaaagtaaataccatccaaagggattaagattgactataaattttaaaatatgaacattctgaatttttcttcctgttattaatgcttaatgaagtcctggaaatgggaacggagaagtggatccaaatacatccacatctgcgtgtgctttttgctggggctttatctgcattctctctctgctatggtctgagtgcttgcatcctcccaaaattcatatgttgaaacctaatccccaatgtgctggtattaagagatgggaaacaattaggttatgagggctctgccttcatgaatgggattagtgcccttataaaagaggcccaaggaaacttgtttgccccttctaccatacgaggacacagaatgatggccccatccatgaggcagagagctagcactcaccagacaccaaatcagctagcaccttatcttggactttccagcctcaaggactgtgagcaataaatttctgtcatttataaattatccaatctaagatattttgttatagtagcccaaaaggactaagacatcccccttaatgactggagtcagaatcacatcaaaaaataaggctgagttggagccagcaacatttattcacaagagaaagacaggaattggactggctgcagagaggcccacagagtcagagaccatccacctcagctacagcacagggctcagcactgtatttctggtgttagtgctattctcaattctgtccctagttcctgctactgaggaactccatacacagcaggacagtcttctgctgtgccatgaattcaaacacaatctgtaaagacagtgaaggaagctacgtctgtgcttaggtgctttagagaattatcggcttgcagtaataagagaaatgtctgggctgggtagtcctcaaagactcccatgtggttcaagataacaaaatataaaggctgagcatctcgtgctcccaacctagttctaaggcgtctatggagggatagtgagtggggctctctatggcagtgattgcctctaatgaaggaaccaaaagccaggcagggattagggtgggcttctggttttagaaaacatgatggtagagctcttcataggaagtttttaagatcaaggtaggatcctgcttggaggatcgtagcctggcagtctggatcagcctggtggtggaggtgaagggtgtggaagctggactcactttggcacacaaagttcaggaatgagttgacaaccaaggccccgtggctatggaagatcgtatcacatgaccccaaagtatggcagggcagccagcggagcagttctacctctctaccttgggcctgcagggtgacatcaacattgataacattgaaggcatgatgttgtcaatatttattataagcacacttataatcttaaatttgcactttatcctagcctccgtggtgcctattgtatttatgggtgagtagttggaggtgacagaatataatctttcagttgcatttaaagttttatgtttcttaaagttacagaaagttcgttcccaggactggggctaatggctcttctcctgctccttacagataatgtggcacttccattgcctagtatggaaccaatatatcacatgaatgtgcacttacctagaactagtcttatatcaggaatgaggatccagggatccttgcaaagaaagaaataataattcagagaaaccctacactctcaggataagaagggggaaaatcaaggttcccgccatcaaccaaatggtttgagtccaggcagaatctaaaccatcactcacagtgcgccatctgctccagcaccagccctcctgattcttttgcaggtcagcaggcatgaaagagttaatagcaaaggccatgagaaacttgctcgctgttatagagaaatcacttttagttccagttgctgctgccagaggagatgcttgagagcaagataggaaataataaggaagaaaaggacttttgaatcacatgagagtcttcgaggactactcagcccagatgttcctcttattgcttcaagccaataattctctaaagcccccatgcacagatgtagcttccttcactgtctttacagattgtgtttgaattcatggcagaccaggagactgtcctgctgagtatggacttcctcagtagcaggaactagggacagaattaagaataatataacatatatgaaataactgtattccataactggaaatacagtgctgagccctgtgctatagctgaggtggatagtctctgcactttaaaagagagtctttgagcaactgcagacaaagactgatataacttcttgattagaaaatcagctgaaaggccgggcgcagtggctcacgcctgtaatcccagcactttgggaggctgcggggagtggatcacttgaggtcaggagttcaagatcagcccgactaacatagtgaaaccctgtttgtactaaaaatacaaaaattagctgggcatggtggtgcatgtctgtaatcccagctacttgggaagctgaggcaggagaattgcatgaacccaggaggcagaggttgcagtgagccgagactgtgccattgcactccagcctgggcaacagagccagacttcatctagaaaaagaaaaaaaaaaatcagctgaaaagaccagaagagaactccatgagacagggaataatggtgagccaggactattataggagaaacagatctgggccagattcaggacttcacccattccaattttagagaggagggcttggaatttaaggactgagcccttccaccatcactatccactccatgctaagagaacattaggtggcctctgtttttaaggctctgtgctgctgagcaggacatgcttgctattgaggtgggtaggatagtaggttacctataaggttccttccaggcagtaaagaaactgaagaaagagcaggttaggaaaagggagagaagtgttggtgcagcagccagccacagggaaaggaatttggtggccttggagggagggaaagtggggacagtatcttcagtaggattaacatggatttgcatttgaattgtaaaatgagaagttgcttagtcggatctcagactgagggtccatggtgctcctatatgtttctagattatttgtaatatgctgtttatatgcatgtatatgtacaaatgtaagagctcttagcaaacttaagcatacacacaaagacttaaattacttgtttaatacagtggtgtccagttggtttttttgtttgtttgtttgtttgtttttggccaaattctttgatgaagtcaaatctaatttgaaagttgaaggtctaaaacagataaatgcaagagctactgtgatcgaagcagacaaattgaggagagcaaaatcatttaatcaaagaggaagacgtgacccagctcaacttcctggtggacgacctcagctgtgctgttgttactagtgtctaacaggaagaggaacctaattacagctcagccacttcgagctgctgagcttgagcaaattatctcatctctctgaggattcatttcctcttctgtaaaatggggatatcagtagctagttttagataactgtgtgaggatgattaaatgatacaacatacctgaaagcacctagcataatatctggtgaaagcagtgaaagacgctggacaagtgtttgtttcctttctgcagccaattaagattctgggaaactgtaactctacccaggctttccagtagcttattttttattgttctattgtagtgcttaaataaggataacttttccagagatagcctaagtttctcatttctctggctcttggaatttccagtgcttcacaaagactttagtgttaagaatgtaaggtgtagcacagtatttcaataagtccccagttctacatggaagggagcagtgtgccacaaatgttcttggcattgattcacatttagatatacatttcagtcatgacatggacatagatataaaactgaaacaaaagtttcacgaaattaataaacataacgtgatgcactttttaattttttttcattaaaaatagactactggtcacaatcattaaattaatttcacaaacccataatgggccactgcccattatggattcaataaacactgtgtgatatgcactttgaaaacgaccactgtatttggatccagtgtgggagtgataagaaggaatatggactcatcaccaactgcccatatttttaggaccctctagagtgattttttttttttctgaaaagccagaattctaagattgtcatcacatattttcaccggaaattaatgtcattccttggttttagcttctctgcatagaacactacatgcctgagtttgtgttgccacatttgcatgggcacaaataagttatttttaccacaaatatttaaccttccagtttgaagctgtgctgtgcttagcctaaacagcatagagagaccaactgtgtttataattaaagaaaaatgctgtgcaaagccacagaaggaaggaagaggcaattcttgttggaggtatgtgtcactgctttcaaggggttccctgaggtgcttgactccacacggactctttcattcctgctaggttgcgaatactacaccaagtgctgtggacagagagatgtagatgaagcaccggcctgtaaagagtctggtgggggagtctgacaggaaattgttccagtgtaatagtgtcaatcatataattggtggtttcaaattttgtatagatgggagagttgtcagccttccacaggggagagggtggtgaccagagacacatgctgaccccacttgagcaggctcttggaaatacggaaatccttcccaataggaaaggaaaggttgaagatacaagagagggaggggataactgctgtgcgggctttgacctggagatacgtggcccagctcttctcacagagcacacaggatgctctgccctcctataacaggcacatcagggccccatctcatctttgtggcatatggaagcaaatgttactccatgggcaggattcagaggcagccatgtgctgctcttagtacaagggcagaggacccagcattaatgcagtgctttctatcacctttcccaactaccagaactttggcccacccatctgcctcctctctcccaggtctcttggtgcccaggttttctctgcatacttgctgcactctctggtgtcctggaagcagctctgccctcttccaacctggctcagccttgaaagggccccttttttcacattggtgcaggtaggtcttttgccaccatccaagccttgttcctattcttctatcaacttccatcagcttgtatggaacaacacatcccctccccagtgctctgctgtgcacattgaaactgcccttctcagatcagagccccgcccctgtcatcccatgcacctcctacatcccgcccctgactcttggatgtcgcacttctgttcagacttcatctctgatttcagcattagatacagaagctttttcctgctaagtcctctcctcccagatctaattcacagccagcaaatccagctgtgggcagtctttgagcatttactctaaagctctaaaggacccaaaggtgatgcaagagccacctccctccactcagaaaggaaacactcactgtgtccatttggcttcaatcagacaaacccaagacattcagagggatgaaccgacctgaaaaatatccctaaaaacctactttaacagaaagcacaaagtttcaggaaagaatggaagaaattatagaaactggaattatacaaactagtaggggcatggaggcatgcacacagcttagaagagaaggaagtcactctatctgcttcagtgtcatgatggtgtgagaccttgaccaagaatgtaaatttaaaccttctgggaaactttgctgtgctccagcagacaaagaaaaggaggctgaggaaagtgtcagagccaaggtggactgataggagggaggagcgtgtctaatctcaagcagcctgctctggtgcaaggacacagccaggaacactggaactcaggaacactgggacacacctgccaaggctgccagagaagcatttcatgggagtggaccccaaggccaagtcacaggaattgcagtcaagcaacatcaagtcaaaagacaggctgcaaggtaggaggtgaagacatgagcagaaggctggagagattgagcagagacttcaaagctggaaatcagactttagcaaatgagaggtcaggacaaggaagcaggggtatgttacagagcagacaagaggcagagcccaccctggaacatgttattcacggtgcctaccatctcagcctcccctgcatgcatgtacaacttcacccctaatatctgttgaacaagcagccctaaccaccgaggtttgtaaaatgtcctggccacaggtgattggatcaagatggggacatgctcccagaaagctgtttatgggctgtccagtgacttatgacatggcctggcaccccaaggtgggttgggtcaattagattatgccaccaaacttagaaatgtcagggaaatgaggcaatcatagttccttctcttgggcttctctaagaatccatttctattattgttccataagtactttattatagaacaccataagcactcccatctagactctcactgaactgccttgattcagcctctgttcccgtacaacctgaagactcaccagaacacgtatggacttgcagctgtccagaagcacagtgatgaatggtgtgtttggccactccatttgttttcacatagtttcccacagtttagaagtgctgaagatgagaccttaaaagagttggaacccccctgagtagaaaagaagctggaattagcaaaataacacaaataggcatgagattcatcctactgggaggaagtcacccttacaagaagagaagcacaaatgaggaggacccccgctcacttaagtgtaaaaaaaatgctgtgtttagaagctcagtaagatcacagttagtgacttttcccagagggggtataagaagtttcatggagacccaaaaggtctgatggcaagataccttcccaatgttgagtaaggcgccatagtctgccaaaactcttcaaagccactgcttctcatggacataaacgttccaccagaagtgaacatggtggtattttttgagtggaacaatgaaagatgtgagaatacaggtggtattttcattgcttcttcctactgccctttggaactctggaagactgaagaatatctaaagatgatcagtagtggacttacaagaataggttgatatttagaatgaggttctgaaacacagcttaagataccagaataaatcattctagccatgagtgcagagaatcttacaaagacatgggggactatgttgcttagcgactgatcagctgatctcatcaagaggatttaaaaactgataccaggaggaagagtaagacaacacaataaaatagacaacccacaagaccagttgctatgaatgacatccagtgggatgtggaaaaaaagggttccaggacaggaggtttccagtgattcacaggagataagattgaatcctagatgtaagtgatggccatggccttgggtgtcctaatgcatcctgcagagagaacaaacagaataacccaggacaatgatcacagccttgtagatataactggcacccaaacatgtcaacagaccacttagaagcagacagattaatgtgctatacatgcctgaagagctgtgtacctaacgttgaaagctcattgatacacatattgtgggcattagcagaaatgagcctgccagggaaatatgacaggtggagaggtgagactcctaaaacaaatcaaagcactagtacagagataaaaatccagtggtgagggagaaacccactgaggagatgtttcctggaagtcttctttggttaaagacaaagtgaaaacttctccagttgctttgctacaagtattagaatacttttgatgtaatgaacagaaatcctgacacaaactagattgaacaaagaaactgtagcatctggacaaagggtctagagataggattgtagattccatggttaaggatggggggttccgggattgtagattctgtggttaatgatggtatcaggaacaccagttcttcccaggctattgggccatccttccttcctttctgttcatcttcaggttggtcgcaagatggatgcaggtctaggcattgcatccagacatgaaagtagccacaggaaaacgcacttcttgtagctctctgttaagagcaaggaaaaaattattcaagtgcccagcaaactggctccttacacatcatggccagaagtatgccaatttttgaagcagtcactggcaaaaggaatgggactgtgtgggcccaacaggttcagccctggagatggatcccttcttctgggacaccaagaaaaacaccatccccttctcccctggcaatacccagccaaccttccagctatgactctcccccacaggcaccctgtttcttctcatgacaactctgcactccattatccacctcctgggagcaaaccattttgtagcctattccaaaaagctcaagccagcacagacaccacagggcagcaaacgaaatctgaatctcaaagcttgccagaccagcagcgcccactgagaaactctccagataagagatgatcccaggaaccccaccgcctcctgccatgtctctgcacatgccatcaacgctctgctctcagtgaaaatggctgaggggaggagcttttcctctacagacccaacgctgccatttcccacccctgtggtgggactcgaagaggggctggagaacacgtctccacacacatacagctgtggcctgcttttggctctctcctcccactcttctgcagcgcaaaccagggtggaggatggtgtcagacccgtctttcggaacacttgtcatttcaagaaccagagaggcaaagcccttcaggcatgtttggagtcccagagagctcagcacaggactcgtgctgccaacactgtgactctagactatcttgctgggaatcgggatttcagctcctctttccacacaccttcacccccagcactgggcacccacttctgcagctccccactcaaattggtccccctcctttatgacactgggcttctctggattcctgtcagccgttttctccagtcctggggctctcaatatctccaaatactcacatgggtaatgggttccttgacccaatgacaagcatctgtctctcaaagagcagtaggcctttcctagggcctctgccatcagctctgctgccctttgctgccctcccctggccattgacatcactgcaggtaactcttcaggactctgatgggttcattgatacatccattcaaaaaaaaagtatttaggggccctgtgtaccacgcgatgtccagacactgaggattcagtgataaaaacacatggcgcctgccttccaggagtacacagtctagtgaggaaaatgagagagagggagaaaagcagagagagagagagataatgaatgaatgagaatgagaatgaaagaaggaatgagaatgagagagaggactttttgaatgggaatgagtggattctggtgtgcccttgtggaagtctagatttgctcattgttctgcagacccgactgcctaacatgttcacctgaaaaggaatcccctggcctcccctttggaagtggagttggagaatttattttaaaccgaatatttctgagcaagtgcaaagcaccctacctggcactgaggtataatggggaaatgctggtcccatcccccacagaatttacaatctggctgaggaaatagacataagaaaataattagattgtttaataacagttatggtgttacctggtactgtattctgtcttagtcatacctagcaagagctccacacagcaaggatagggcatggggtccatgttttagggggtagaaggagtgaaccacagagagcacagcccgtgcacatggtaggcacctcaggaagtgctgaatgcatgaaagaggctgcgcagcagacaaggctcctgggagccaaggccagtgtctccagccagctcagctgaaatcagcagctcatgtgctccgttcttcaccttcagcatgcccacttcatcctgaaactctcttctacccaccacctcatctccagatgcagatcctaatgtcccagacaggactgttggcaggttccaagtcaagtgaaggataattcaagagccacagtccaatagtgcaggagccatatctgctctatttgccattgtatacccaatccttcacatagtacctggcacataggaggtactccataattctgtgacggttgttgaatgaatgcatggattttgcataactattcaggcaagagcttagcttctatagagaatttggtcatgattggattcatttgatcagtggaagcagccattccagtttactatagaagtaacattccagttactatagaagtagatttagaacctaatttggcctattggctacaaaaagggtacagactctgagttgtagtgagactgccagtctacctgcaggtcgatgagggctcctccatcctccctgggctgagatttaatagtgcctctttttgctcagcctgctctctaatcctcagggtgagagatcagtatgaactgacaggtctgagaaatcttcctaggggaggaagaagggtttccagctgcaaggagagagcagcgtgcagtgacagtgaggcaccaggatgtagaacaatgctgccagaacatattccctgaggtttgggaatgaacttcttcaagggctgtgctccctttttgatgggtcctagtgggcctctgtgctggtcgtgaccgacttttcttcaatgatccagtggaggctgcaatgtattttgcttaaaactacagctggtttataattttggcctcagacagtaattacagctgctggggctccttggagagataattacggaaagaattcagcatattcattttatctacacacttaaccatcaattaaatcattaccatctaatcctattccagagtctagaaatgttctgtgaatatataattttgaaggcactgaagtttgttttcagatggttttaagtgaaaaattgcccaatttccatagccaatggaggctttctctatgaaagcagagccgagagtatctcctggcttgtggttgctgcctccctgggggcctgcaccacataaagggccaagcaggaatggattgataggcgggagctgggactttgcctttgatctcccatggagtttgtgattttccaaagcaggattagcactgggacttagaggtcagtggctggagacagacaagagggtggcttgttttgccaaggagcttccaggagagtcttcccctgctgggattctgctagggccctgggctgtcatccacttatcaaagtcaggatggggtcttttcactttgggaacccaggagagagtgtggtatttaaaagcatgagtgctggagctggcttcactttctggctttgccatttttgagttgtgtgtccttgagcaagtttctaaattcctctaaacctcaggttattccactctttagcaacacaacaatagatcctacctcacagagctgtgtgagacttaaatgaaaaaatgaatgtaacatgtttaacacagcatctggaacttaatggatgctaggtaaactttgataattgatattattcaacatacatgtatgtacaagaaaaggagagaggcagaagggagaaatcaaatgtccaaaaatgtgcttcagcgggaaccagggcctctgaaagcatatgtggcatgggctgggactgcccctgggcttcactgtccagccttggactccacggctgctctctgctctctctgaccttgacttcccttggggatggtcgcctgggaacctctgactgcagtccccctctgtacccctcctccctgaccctaccctctcatggctccagcctggtgctcctccaaaaaccttgctgcactgctggtaccctgaatatgcctgttctcctcctacacttccaaccatccttttctctctttctcatgggctttcgctggctgacggtgggatatagtcatgcctcaagtttctgacctaagtcactttttgtttttttctacaccacacaaagcagcatctgggaagacggcccacagggatgcaactgcttcctggcctctttcagccagggaggcaatttttctaatagacaggagtcttgggctgaatcctcttcagactgttcctaacactggaatcccagaggcactgtctatacagtggggccctgaggaagtctcctctttgtgagctgactcttccagatggctgcactagtcctctggccagtgtttgggctcagacaatcctaccctactgtacacggtacgtggctcctgtgctgaagttactaaaaagcccagctcttgtagctggcatagaactggtcacaaggctggcttttgccctggcataagccgcgtctatgtgggagccccaagctgggaaccagccccaggcacagcatcaagtccacgtggcagacttgcctgaaaaacacccacttgaccttatagttgtgcctatcaccgagccaagggctgcaaaggaaatgaaaagctcccaactgctgaaatcatggagctggaatatcaagtctctatgttcaaggataatcatggttatcgttggaaggactgtacagtgaagattaatttttaacctcctctgagagttgtaagaattaaataagttaataaatgcagaacacttacaagagtgcctagtacctaatgtgtgctcaatggatattagctattattagtatcattattattaaaggagaaaccaggcttcatgaggtttatggagtcttggccagaaacactgattctcctgctttgagaactctcaggagggcttactcttgggctggtcctcctgtccagtgatctccagagccagtgacaacatgacaacttcctgatcccaaacattagcatgtggtataccacaggtaccacaggatggtcttttaggaacgtagatcctagcacttcccagagcaagggaagaaaaagccctccctggccatcccccccagcctctctgccttgattccctcaaggggaagcaggaggggatgcccacaagctccctctccagaggcggaagaccaataccctcatttctccttgcttctcctcccctcctcctggagaatgtgggtaggtggttcctgccctgccctttctgtctgtgagcccactttggtccctggtcagctccgcaggcctcctgcaatcactgctgaatcatgaatgatccactgggcagtgaggacccaatccctgaggggagcttgggagagaagcatgggacacatcagcatcgccagggctgtccacctcagggcccagaggcatacatcctggtgcccttttgcttcactatttgcagtttggcaacatggaagtgtgtgtgtctgcagagctggtgaggtcactctgtctgatgcaccactaaagctttccaatgttctggaagtgtctgattcggggtctgatcaatcttgccctcatatcgctgattctctgagcagggacagatgtggccaccttcctgtaccatagtgaatacctcagggaactgcctgcccccttcatgactcaccctggtacctcaccccaattctccatctttctctctggctctccgtggcttccttttataggttagaacccaagttccttagagggcacacagaggccttcacaacctgacccctctctatctggaggcacagcccatcactgcttttgaacattttatgccccggccccagcacacaggccacttctagtaccctggcaacactgctctgtggtgccactttgcttttgctcatgctgttctctttgtctgcgatagctacacaaagctccctcacaaacattcacttccttcgaactcaacatacagataaacttttctctgtatatatatctttgtgatagctcccacaatcctattttgtaattttgtgttggttttactgaatcaactatgagttccctgagaacagatactgtatctcattcatctctgaatcctgaggccatacagataaccttttctctgtatatatatctttgtgatagctcccataatgctattttgtaattttgtgttggttttcctgaatcaactatgagttccctgagaacagatactgtatctcattcatctctgaatcctgaggccattgtgtaggccccagcgtacaactaggtgcccagtgttggctgaatgagagcaagagggtgggttcagcttctcatttgctcagcatgaagtgtgcaaattccttcctgactcagaaattagggatccttcattgacagtcattgtatggtttcagaagattgcacgttcaaatgtctacactcgaaaaagctgaatgaaaaacaccctcaccaacagcatctcatgttttgcctaacagcatgagctctgcctctctgtaggggctttaagcaaagccttgacagtctgcaaggagagaatagccatggggctcggggtcccgtgaactttgggatatttcacaaatatcctaaatattgttgagacagtctagtgactttgtgaaactgaggagaaatggggaggccttctctccgaagggcttcagagccatctggttctatctgggatttattctgaatgcagcctttacagtgagagggcgccacactcaggtgcagggatctggcttgagacttggggaaaacatcattgcctttgatggcgcctgctaaaagcagtgtggacacagacacctcatgcacatcttctccgttcagggctccaaatccctgctgcggctcgcctcaaggcggaacggggtagcagcacacacctcctgttccaaggaagacagcatctgctgtgagtgtgccgctttagcaagatgactgtgctttattgattgcaatttcatgctgcgattatgcacgtcaatctacgctgaaaatggcaactgtgccccctgcatctccgatgttgtgtggtgtgtggttctgttttccagacatactgaaatagtttgaaaaagtggcaaaacctgctctacagagcaaaaagaattatcttaaaataactcacttttcataggccttcaaacgtcattctttagcagggcccaatgagtgaggggcagggtctctacagcttccccagagacctgaacccctcttttcagtcgtggcttcacggtggatgggtcatcactaaggatgagaaggctgccaggcccagttgactggggtggggcagattcagggcttgaggtggaaaggaaaactgggagcagcaggggcttagtcttcacagaatgaaggagggtggccaagggtgttgctgatggaaccagggaggagaagccaagactcagagggttataagaaagtggaggagcaaaggcatcaaggagcaaaagaggtcaggcatggtggctcacacctgtaatcccagcgctttgggaggccaaggtgggcggatcacttgaaatcaggagtttgagaccagcctagacaacatggcaaaaccctgtctctactaaaaatacaaaaattaaccgggcatggtggtggatgcctataatcccagctactcaggaggctgaggcacgagaattgcttgaacccaggaggcaacagttgcagtgagccagcctgggcaacagagtgagactccacctcaaaaaaaaaaaaaaaaaaaaaaaaaaaatggagcaaaagcgacaaccttgccaggccaccctgaggtgcatagatgcatggaatgtgagggactaagtggcctcttgagagtgctacaaagaaagtgttgtgacttcaaaagagaaccaggattcagttgaagtgagaaagtggatagaaagtttacatgaaggattaaggatgtaggggaggtaggtgtggagcaccagaggaaggctggagacagtggaagtgggggctggtttggagaaggggaagtacagggcaggatatgatgacagtagggacaagaaaagcaactggactgggggtgtggaaagcacagcctgccaggtttgatctcaaggggcaaagtctgcttcacccacaggaagcaaggtgaccaggctatcctagaaaataaagccacagccatcctcagaccagctgttctcctagagttgtttgagagagggcctgaactgtctctcctcatgtacccatttattcgtccattccccagtgtttgtgagcattgggtctggtgggcccctgctcttcccaccaccttaaaccctctcctgcctgcccaactaccaccccctcccctgtgcccagctaacttctcaactcctgtctgccttctccccgatgccagtcattgcccgcctcccaagcaggcatgctttgcctgtaatatgatccctccgatgaataataatccaatgttacattttctactctatccagaccactgtgctcagtgctgtacaggcatccccagtttaactctcaccctgtgaagtaaacagttttgtctccccagataaaagaagctgaggcttaactaatttatccaacatcatgaggcaaataactggccgagctatcagattaaggtagatggtattatttcttcatggttatatgccccagcacactcttgtcagggtcttgactccaatgacttaggactcgggcctgggatttgcttcaatcaatagaatatgaaaggatgacaacatgccagttccacatgtttctactcacccccttgaacttttagcatctgtcatgggaataacatgcgctggaagacgggggcttcttcagctcggtcctggaacaagaagacgcagaagtagatttctacctgtctggcagagctgcagccaaccacaaactcatcagcaagaaattagtgtgtattgttgtaagcaactaagatttggagttgttattgtaagaaaagctgacaaaatacagatttaaactcacagtgttcctccatctctgcctgttggacatagctaccaagcttatttgggtccaaatgcggacttacttctctccacctgttaggaaaggctttctctcttcattattttatcatcaagatgaatctcacaacctactggaattccagtttaacttttcttttccttctcttgccctctccctggaaaaagttttacacatgccgacacatgtcagcaaacctctcaacctcacatctgtgctggtcaagcggctttgaagacacagctataccagtcagagcacaatcagtttctgacatggtcagtgtcgggatcacacagtaatgctggttttaaaagacttttctttctcagctgttattattcagctcacttaacaattaaaactagaacaatgccttagaatttttaagaaaattcttttgtttccatcctgctggcaccgattcatcatcctttatgacttcacattcccaaatgatttgtgatgtaggttttttgctaatgtactttcagttgttttgcttctgatgtttcctccccacctaatcaaatgcttcaaaataaccataatttctaaacccagtaggacataggacatgcactgaataatatgcactaaaatttattaacagaaagccctttgtttttaaaactctgaaagctaatggaatactcttttttactttagaaggcatgctgtgttctgtgtggttttcccacagatgtgtttttaaatgttgcattctgttaagactaaatgttgtatttgcaaagattttactcccccaaagcagaacataatttccctcgctatcttagcttgaaaaggcctgaagtgaaaatgtatgactttgcttatgcagcttttcttctcctcttcagataaaagaaccacattttcctttgaggactcacccctcttccccctctaaccatgtggtttgggtagaggcatccacatcctcagctccaggaatgtctttgcatctccccaggcttaagcccaatcatcacattcagggattggttcggggtgagtgtgtgacccaatttaggcccaggaattttgttggaactatccggaaaagtcacatctttccactggacttgaagctgtgaggatgcaaatgtggggttgttggctgctatctcaccatcaaaataatagagtgcactccgggatggagtgaaacaaaagaaagcatacttgagaagtagagaaggtgataatgagtcctgatgacactgtctgaacctctggatccagctgtgcctgaaactgttccttgcaagggactagcatgtacctcatgaccgacaacaacaaatctgacattgctgctggttggattccaactctagagaaagagatagctagaaaattagtctgcacacacaaaagcagagaaaaaatacacaaaatacccagtggttaattttaaaatgtgaatgagcaatcaagggtcactaagtaagacagaactgacagcattaatagaggtttatatttaaaacacacacacacacacacacacacacacactgaggaaaaacaaacaatgataagaaatcaaattcaagtgtaaaataaatcaaaagtatagtaatcttaagtaattaacatgtagaaaatctactcacaagcacttctgcttgttgccacattggcctcaagtattagataagaatgtcctggctcccagaggccttctcactcctgattctgttccctgcagttctcctcactcagaaaagctgctctctgactctgtccactgcttctttcccacagaggtgtaggtacgtaagttggggccatttcaaaggcaatcttctctcatcctcttgtgcaatgtcttgagaggctgctctgaagaagttctaatttttgacaaagttttgcttctatacggtcaaaatgatctcactggggtttccacatgttgctcctggtctgtccattaggacagctctgaacgtccccttcccttccagagtgcttttgtttttatttttgccttacccatactcctttcagagagactggtccttagagcagaacataaattccatacaagatagcaatggagccagttgcccagagagctttgaacgggacagttatcacaccctgagtcaagtagaatgctttgggcttctaggaacagaaaacctaacccaaactcctttttatgaggtgaggttttgctcttgttgcgtaggctggagtgcaatgatgcgatctcggctcaccacaacctccgcctcctgggttcaaatgattctcctgcctcagcctcccgagtagctgggattacagtcatgcaccaccacgcccagctaattttgtatttttagtagagacggggtttcttcatgttggtcaggctgctcccgaactcccgacctgagatgatccccctgcctcggcctcccaaagtgctgggattacaggtgtgagccaccgcgcccggccctgaaactcctttaaagaataaaatgaggccgggcaccgtggctcatgcctgtaatcccagcactttgggtgcctaaggcggatggattgcttgagctcaggagttctagaccagcctgggagacatactgagacctccgtctttacaaatataacaaaaattagccaggcatggtggcgtgcccactatggggaggagtgggtactgtcagtacaagctgggaagatactccaaagtgtttctgtaacccctaggagccagccattggcttatctatcatcagttcccatgaccatcttcagttgtcctggtctctagcatgcacacattcattcagccagtgtttactgagccccgccatatgccacatgctattcccaacactgggaataaggtgttgagcaaggcagtgagtggggacccctgtgccgtggaggttgcattctggtggagggagacaggcaaattgcatacagttgaacagaaaataggtcatcacaagctggacgatgcaaatacaaaggcaagatgtgacagcagtgatggggcactcctttgtgctgggtggctggggaaggccctgagaaaatgacactttccctgactgaccagaagcagacagccaagcagaggcctgagaagtgcatttccatcacagagcagatggccagcatgcatctctggagcaaggaccagcgtggcctgtccagaagtagagaggaggcaggtgtggccaggaccatgagcaacgagaggtagagttgtaggagaggaggccgaaagggagtcaggccagggcgcagagggcatggcccctaagttcagatctcagtcgccctcctcaggagcaccagggaagaggccttaagcccagtctccttcagcaggcaccctctgtggtctcctcttgtttgacaggccagaggctcccagctggccaagagggctcagcttccccacagggcaggataccaatccctaagtccaggtgagtcgccccttttctgacattgctgctccccagtcacttttctttcctttccttgctacctacctgatttccagcccttgatgagagtccaagcctccagctcccagaatcacccttcattttaatactcaaataccctgagtccccaccctttctctctagcccttagttgatgtcttcctcccatttgtctctgcagtggcctgaggaatggtcttttttgcatctcatgattccagatgatgcttaccatttccgctctctgctgcactccaggcttctctacagccatctttagaggccttcagctgcttctcccagccaccatcttctccctgccctatccccacatcctatcccaagcacggacacagtccctttccccattcccccaaagcatgcaaatgccagactatagcatttaatgaagatttcctaagggctggggataacacgagtgaagacaatgcgagtaactgaaattaaaaattctatagccagggaaagaaacatccatctaatatcataattgtctctgccaataggaaactgcctacggggaacacattttacattgttatgcagaataacacagcctctcattctgagattggacctgggcattacctttaataacctaaggcccctgatacctccccaaagagctgtttccccagcaccccaacacactgtcttgcaggtggtttcttcactagggtgccaggatgaggagatgtgtgaagctaaagtcagctcaaagtcagctttctctccactcaccaagtggtgagtttgcctggaggaggcttctgtttctaagtcacacaaaggcccaatgctaacagcatggctgagagatacatgccgtggcctactatcagccacagtgtatagaggacagcagatacacagatgagagaaaacgaattcagctaataggttttatttgttttgacattgtgagtatctttgagatgaaaagctaatagttggaatagtgccaaaaatcttaatattattaataacatatcaataaaagcctctaaacctttaaggataaaagaaagtttcttatcttgtatcctcttttcaaacacatttaagggcctttgtttctgtctctttcactgagaaaaaaaaagcaagctgcaagacaatacattttctaaaattagcacacatttaattgacttttcaaaatgaagttctattcaacctattagatgtgtatattccatacaacattccaatgtttaagctatttttttttttttttttgagacagattcttgctctgtcatccaggctggactgcagtggcgccatctcggctcactgcagcctctgcctcctgggctcaagcgattctcctacctcagcctcccaagtagctgggactacaggcacccgccaccacgcctggttaatttttgtattttttttttttgtagagatggggttttaccatgttgcccaggctggtcctgtactcctggatccaagtgatccacccacctcggcctcccaaagttctgggatttagacatgagccattgtccctggctcatttaagctaattctgagactttttcccaaatacagaaaaacacatctgtaaatcaccattggagaaagaaaggagaacgtgaaggtcctgggaaaggggtgaaggcccctgcttgaggacttcatggggttggtacttagtccctcatggtatcacaataggctatgcattctacagctgctctttgtgacctgtgtaaattctgggcaaaaatggcctttccctgggtcatgtctgctaaagcaagtatcaccatccagtcagatggggctgatcccagcaggtgcccaagaaggaagtcacccactgtctaaaagtcctacataatcctcagggttcattttaggtgccacctcctccatgaagtttctagtgagcaatgccccatttggaatgaagtactcccttaatagtttgattgtatttagattgtatttgattatacatttaccacttaccacctctcatttttattttgtagttagttggatacatctgtcttctctcctgatgtgaactctttaggtctggggcatagggtctgtcagtacccactaaattgactatttttagttgatttggacttactgcagaccttttactaaacatggcaattgagcttttgctctctgatcatggagaagtttccagtatgcaatagtcaggaggcaggagggggctggtcagtgtgtaagtactcaagggaggattaaaacaaggtacagtctgcacacagctcctcacagtgggtggaggcacccagaggagagaggcaagctgcctgcacatgcagcaggctggttacacctccctccagtgtcttccccatgtcaggcaaatgagagctagaggaccttgggatcttgctctttagccagaaaatggccaccctccataagtggtaatggtgatatcctgaaatcaagttcacaggtgaacagatctaatgtccattttattgttcactaaagtttagggtcagttgagagtgggtgataaatatatgactcttcattcattatctctttggtatttatatttttgacttattttttcagaactccattggtccctattcaggaaatgctaaatttaaacagccccgtcctgttttgggaccagccacctagagttctcaagtgctaaaggcaacgacctccttcccatcctcactcaccagtaattccacagggccaggctcagtgagatctgtcaaggcaagaggggtgcttcagctgatcccatactatcactcaattctggttttctgactctcttatttgttttcaatccaacctctacactccttcaagtactaaagtacaaatctgagcatgtaactctcccacttaaaaatccttcaataactgcccttcattctgaacaagatcaagatcgagttccctaccttggcattcaaggtcctctgcgaccctgcctccatctcctccttatactttatgttggggccacacctaatggctggtggttcacacagtgctttctattcacccccatgcccttgcttctgctttaactttttcttgtgctgtcctttcaacccctcttttcctgcctagatccagcctgtctttttagcatctaatcagttgtcagcttcttcaggaagcattctgaagatcctgtggtatgagctaaatgcttctcgtctgtgctatcctctcctagcaccctgtgcctgcccctgacatagcatttggtgccacttgatattatctgtgtgtgtgtcatccccagcacctcccactgctccttgagaatgggcctaagtgttattcatcattgtataacaagcacctggcaaaatgcctggcacaaagtcagcattgaataagttcttgttggacagaatttcaatttcttctatcttacaacttgtaaaatgatttttacaagttttacttactgatttcttagataaattctccatgtcaatttttcttcaaatctacaggcatagtggttctattaatgcaccaaagcaactgagagctagctctgaatgccaaagagccaggcaacacccatgagaatgaagacagtggcagtgaaggtcccagtcatcatctcagatggatttgcagtgtcatgagggctcaaacagttctcataaaggtctttataagagacttaccttagtttaaaaggcaggttgggaaacccatgaccatttcctccagaaagcacagaattcctgcaagcctggggtcactattttggctgccatgctgtcagcttatcccagcaatctttcaaggtgcttcactgtatggcatcatttgctgtattgtaagaattctgttcaagtaagaatcaatcaagcttcctttgaaacaatcactttgcataaggaaatgggagtttcaaggatgtatttatttgttcaacaaatattgattgaatacctactataggtgctgaagatacatttttagggacaaaatagtcaaaaatctttgctctagtgaaacttgactagtgggagacacagatgtattatgttatagtgaaggtaaatgctatgaagaataaaatagggccgggtgcggtggcgcacacctgtaatcccagcgctttgggaggctgtgatgggcggatcacctgaggtcaggagttcgagactagactgaccaacatggcaaaaccccttctctactaaaagtacaaaaattagccgggcatggtggcggtcgcctgtaatcccagccactcaaaaggctgaggcaggagagtcacttgaacctgggaggcagaggttgcagtgagccgagatcatgctactgcactccagcctgggcaacaagagtgagactccatctcaaaaaaattaattaattaatttaatttaatagagcaagcaatggggatcagaagtgtgacatagattgtttactttttacagggggttaattttaatggaggtaattgtagggctcacaaacaattgcaatatttgagcaaacacttgaaggaggtgagggagcaagccctgtggccatgcagaaatacacgctaagggaacggccaatacaaaggccttaaggaggttcacacgaggatagtgaggagagtaatgtgggggatgcaggagagaaaaaagagagagaagtaggggatgagatcagaaaggtaacagcgggcagagctcaggtaactggaacccagtagagcttcaaaagtactttggctcattcgccaacatggcaatttttaagagagatgtgacatgatccaaagttatcactgatctctctgctgctgtgttgagaatagactagataatgacaaggttggacgtgagaatacccattaggagtctactgctataatctagatggcaataacagaggcttggacagtgtagaagcaaggaacatggtgagaaatggttacattctgggtatattttgaagggagacccaatagggttttctgtagggtatgagagagaaaagtaaaggatgattccaaggttgaccgtggaaagatagagctgccattaagtgagctcaggaagactgcaggtagagcacctatgtgggatgatcaggagttagacctaataggtttgaagcaactattggatatccataggaaaacataaaatagcagttagatgcaggaatctagagttccagagaaagatcaggctgtaaaaatggatgagatgtaaatggtaaagagaagaggtcccaggactaagaactgggacattctatttaaaggtaaagaaaagaagagaaaccgatagactgagaaggagcaagtcattgaagtagtaagaaaaccaagagggtttggtatcctagaaggcaagaaagaaattgtttccaggaagagggaatgcccagatgtgacaaataagatgtaaataaaatgaagattaagaactgacattgggtttaccaatgtgctggatattggtggggtactggtttgaatagtgtcctcccaaaatttacatctacctagaacctcagaatgtcaccttatttggaaataaggtctttgcaggcatgttaagatgagcttatgctggatcagggtaggcaccaaatcccatgactagtgtccttataggaaagccatataaagacctagagggacatacaggagactgccatgtgacaatggaggcaggaattggagtgatgcagctataagcgaaggattgctggcaaccactaagagctaggaagaggcagggaagacttctccccaagagctttcagagaaagcatgggcccactggtaccttgacttcagacttctagcctctagaactgtgagacaataaagttctgttattttcagccatccagtttgtgatacgtcattatggcaaccctaagaaactaacacacttgacgaagcagtcactaacttgtctgtaccttgattttctcatctgtagaacaggaataaaagtacctgcctcagaggattgtggtaaggattaataatatatctaatattcttataatagtacataccaaattctacataatgttaactgttataatgattatagatctaataattctgttttgaaataaaaacacttttttcacttgttctttgctaaattctcattagcttattaatttgacagattaaattttcctaaacttttaaacaccaattttacgtttaatcaaattctcttaaatatttttaaatgagaaaaaagatataaatctagtgagtaaaattctcctaaatttttaagcattgtttaagcaattgattaactacatttctgtgaatatttcaagctaaaatcacaaatttaaaatgtgattatattaaacactccaaacatctaatgcaggtgttaaacaaaattgttctcaatcatgtaactcttataatgctaacaaataaaatcttatacatttaggtgaaatgatgttaagcatttcaatatcttaaaaataagctttataaatgtagtataatagattttcctaagcatttaaatggtgactataaatttaactagttaagttattctaaatatgtccattaaaatcatgaatcttataattttctagtgtatcagattgttaagcatttagcttaaaaacaaaaattgggataacaacatgtgtattgcacttgaataaataaagtttacacaaaagcatcatttataattcttatttgttaaccctttctgtgtcacagttactcttctaattactaggaacacaatgatcagtttaggagctctttctaggaattgaaattacagagatgaccagagatttgagtcccaaattgcagaggtagaataaccgtgcacagacatgggatggggcattggttgcctcacaggggaattttaccagagctatgaattaataaggcaagtttcttcttctggttggcttctgcttgctgtactgtcagtgggagacaatcctaggctttttaatggaattttattttataacccagtgcatcacatatatcctaggaatctttccaatttcacccttatcgaatttttgttataacttttatcattcctattccgtgatttgggtagatggaattatggacacacacactcacacatagtagtcacagagcttcctgctgagacgtccttttattctgtgttccttctcttcatccttgattctatagtcttcttttgaccacactgagcccttcaagaatagaatgtgcattatttatctttgtgttttgtttgtttgttttttgagagggagtctggctctgtcacccaggctggagggcagtggcatgatctcggctcacagcaacctccacctcccaggttcaagtgattctcctgcctcagcctcccaagtagctgggactacaggcacccaccactacacccagctaatttttgtatttttagtagagacgaggtttcaccatgttgaccaggctggtctcgaactcctaacctcaggtgatccatccgccttggccttccaaagtgctgggattacaggcgtgagccacagcgctgagcataactttgttttcttagggctcagcacaaatgcccggtgctcaataaatgtttgttgaatgatgaatacatgtaatgaatattaatttgaagtaacagactccaaacatcctccactttacttcatcaggtagagtaattttggccctatagtaatttcctatcttgccacctcatcgaaaaatatgacagtccttgtcttaccttctgaatggtgccttcactgtagcctttgcttcttgattgtttctaatgagcccctctcagtaaataacaatctacatgtcacacatgccacgcaccatttgccacctttcccctcaaggtctacttgacggtgaatcttaacacactctcctgtgaagtctggactgttcagaattcatttctggactaagaatcctttctagaaaggtgctgtagtggagttaccattcaaagcacaataatttaccattctgggcatagcacttaagagcatacattttaatccataaaagcatggtggcagattctggctctgccatttactacctttattatttggcctttttcagactcagttacctcactgtgaaactgtaattgtaatatctatcacagagggttaaggtgaggcatgaatgagataaggtatgcaaagctcttaggatagagctagtgcttaagcactcaataaatagtagttgttgcccaaatggaccctttcatttttccatgctactggcccaatctcctgaaaggcagtatagtcacattcatactgctttatttctttaacatacttgttcttaaagccgagagaggaagtaaaaaaaaaatagaatgtcctctttacagaaagaagctaatcagattgtaaactggcagcgcgtgataatttttcatatatttgtaaagctgtgctaagcaacagtcaacaaaatcagattctaaaccagcagagcatgatgaatcttcatatatttgcaaagctgtggtaagcaataaatagtcaacaaaatcctgagatttttgtgctttttaaataaaattttaaatgtaaatttaacaatattaagtacataataagattaaatcatgtaataagaatcacttccatttttgacaagcttcttagttcagagcccttaggtacttcctgtaataaagtcccattttcagattcacagagagatattatctaatgtttcactctgtcttttcatgttcttaatttggggtctgtttcaatggcctgtctcatatcagctgtcatttttgtgatcgaaatgtcacttcacattacagttttcattaggacagttctcatctttggtttcaattcaatttaattcaaattagatccttatgtctcaggacaattgaattcacttacaatcttctctgttcagataggattgtaaccactacttcctgttgatactactggagttgttggtaccttctaaacccctggtactgcctgggagcccaccaggtctcataacaaggacactgctgcttctgcccatggaaatggggctggcaccagcactggaaccagccaagctagcattatgctcaacagttattaaaccaccgttactgtctccggtgttgatgactgagtctctaccaccttcctctcaacaaaatcccactgggtcaatgcttttctgaattatggaaaaatctttcttttctcacattttgttttatacaatttttggctgaaaaacagctcactaggttataggagtttggaaaggtgtaatttgcttattttgtttgatttggttgagattttctagtcttcccccaacagaagccagacaaaagggggctgaacaacaacagcaaaatttactcatgtcttctcctgagacaactttttcagaactgacttgtatgcttgactttccctagaataagtttgttttcaagaggcttttcttgcaatattgctggtagcaatgaccctatcacgacaccagatgtattgaaactccttaatcctgtcatcttgtgggcttggtcccagctcacaagcattctaggaccttagtggcgctgtccagaagaggaaaagattcagagcccagaaaactcacccaagtgaagggctgcaccttaagaagggggagaccagtaggctgcaccgccgtatttccagaggctgaccttgattctggctaattacacacacaaggaaattcaccaaatgagcaaaacccagctatggagttcaggtgggagctgtgctatgacttggccattggcaacaatgccaatgctagtggtatccctgggtatggggactggtaaaaaaaattggctaaggttgcagcctagccctctaagcaggctttagacaggccataagaaatcaggtacagaggtggtccctaaggctgggtactttgggagagctaaacccaaagcattctgaaggaactgcttaaatgaagaggtaaaattaggtcataatagggaaaaatgaggttgtgcacagaactgtgggggcaaacaagatacatatgcatgtcactagctgggggaatccagagaaatgggataagcagctaggaaaccataagtgggatgtggcacctgctgtatgctactagtttggactagggttcttaaaggaagctcatctggctagatttagggagtctagaaagccaaggcagataaagtacttttaatacatcagaaatgtagactggacctacagagggaattgacataattgctaaagcttggactttgaaattggaagtcttgggtttaaatctcagctctgacacttagtcacagtgtggccttgtgcaaattagtgtctctacaacgctgcatcctccattaaagaaccccacggggtcttttaagaacttgtaaagtccatatcccagtgcctggcatacaataagtacccaaaaatgaaggaatatgggctgataccatcacaactaattccagaccacattcattggtgacactgagcctgttaacaatttgctttctctgatgggaaggaactcaggaattggcaaactgatatgggtatgggtttcacagttgaaagagcggctagggaaccacgggcctgatgtagatggtggcttagaaagtagagctattcggggccaggcgcggtggctcacgcctgtaatcccagtactttgggaggccgaggcgggcggatcacgaggtcaggagatcaagaccatcatggctaacacagtgaaaccccgtctctactaaaaatacaaaaaaaaaaaattagccgggcgtggtggcgggcgcctgtagtcccagctactcaggaggctgaggcaggagaatggcatgaacccgggaggtggagcttgcagtgagtcgagattgcgccactgcactccagcctggggacagagcaagactccatctcaaaaaaaacgaaagtagagctatttggatggtgctccagggtagcagctgatctggcaaactgatatttgaaccacaatattaagacaaatatcattcagtctttcttcctagacacagaaacaaagacccctttcccagagatgtgtgtgtgtgcccacacacatgcacacacttcaaagccacgggtcacaatcaaacgtggtttccctttgcagtgaacacactggcttttaatactttccttaagtaagttatagcctcacatgtgaacttttgatctctgaaatgaagtccataaatttcattgtcagaatggttgctactcttttatagtttacgtgtaaattttgttattcctatatccatagaagtcacttcagttttttctctctatggccacagtattactacatttaatctgtgctggaaggtgccctgagtttaaattaagttgaatgctgggctgagtgtgaaacacaagagatactgctagtctaagtctggggcttccttaagagagcccctccttcacatctcggaaacaaggaatgatgttgcaccactcagacctcatctttccatcccagctgtattagtccattttcacgctgctgacaaagacatatccgagagtgggaagaaaaagaggtttaactggacttacagttccacatggctggggaggcctcagaatcatggcaggaggcaaaaggcacttcttacatggcagcagcaagagaaaatgaggaagaagcaaaagcagaaacccctgataaacccatcagatctcgtgagacttattcactatcacaagaacagcacggggaagaccggcccccatgattcaattacctcccctgccgggtcccttcccacaacacgtgggaagtctgggaggtacaactcaagttgagatttgggtgggggcacaactaaatcatatcaccagccttacctccgaccacttcattcctcacactacagtccagtcacaccaaattgtgatgattccttcaatgcaccatgccctttattgcattctgcctttgcacagtctctttcctctaccccaagtgacccttcttctttccagagggattcctcttcagcctaaatggcttagctcaagactcatcaatcagaatgctctctatagacctcctcaatccctttgaagttactttctcccttcccattgcccctgcagtattctatgcagcttctcacatcataatatctccatctgtgagccctttgaaagcagggggagtgtcctacttatgggcttagtatccccagcatctattaccatgcctggcacttgtttggtgcacattaaaaatgtatgaatgggccaggcacagtgactcacgcctgtaatcccaccactttgggaggccgaggcaggcagatcacaaggtcaggagttcgagcccagcctggccaacatggtgacaccctgtctctactaaaaatacaaaaattagccaggtgtggcggcgggcacctgtaatcccagctacttgggaggctgaggcaggagaattgcttgaacccaggaggcggaggttgcagtgagccaagatcgcgccactgcactccagcctgggtgacagagcaagactctgtctcaaaaaaaaaaaaaaaagaaaaaaaatgtatgaatgaaagccaaattatttttttgttttttcttcctgcagaaacgatgaccatgggtaagaggactgcttgtgccaaggacaaaataggacaaccatctcacaaagatcttaagtaactttttccatccagcaacatccagacgatttcagtgaccaaatgctcagctgtaaccacagcactaactggccttctttccagattgggtttggtgaacctgaatggtccagccaccttctgcaggtggcccaaggtgatgtgctgcagggaagcatgtctctcatgccaagaaccaagatcggactatgaacaaaaacaaatgatagatatagtgacagtaccaagagtaccaggactcaatgtttcatatgaagcccttggtgatgaggacatagcatctgccctggaaatcgttattccaacataatattattttctagaatgccctggaaggacagaatatttaaaaatatatccaggtgctaaataggcagcagatctcaattcacacatgactacctttgagctaatgactgtctccagaaaataactgtgccccaagaagtgctccagatttgcaaggaatagccccaagagaataccaagacaagcaggctgttccctggaaaaaatctaatgcaaggagggctagttcacagcaaattcactgcctcctcccatgcacgtggtagagagtaccagtatcaacatggccctgttttctgctaaaaccagattttgaggaatcagagacccccaacactactcactcagtagctagcagccccttcctttcaactgggagtgttattagaatgaaaagtaattagttagaagggcatacatctcagtggcatgagcattgtggaatatcctttcctaggcacattcgtccactaagggaacagcctcagaaactggtacagcaatgggtgagatgagatcatggagagagaacacagccatcccctatagaaaggcacagcttttgggcttctctggcctgaatgccttctggggtatttccatatgcaacagcccagagtcatagccttgggcaaccacacatagaggtttccttctcacttcagacacatacatcactttcacaccacttggggatggaaatacctacaagagtgaaggtcaagggccctccccaggcatctcattcattactcagcttccttcctgaccaagtctgccaaccaatggccagctatgcgcctcatcctcattgcttctgcctccacgtaaatgaaaccaaaggcctcagcatatcctgggaggactgggggctgttacctaatggtcctctctgtcccattataggtgcaaggcaccccatccacacatttgcaccactactccaagatagtatttttcttttcacacaatctctttacagcagaatccagagttggattgtagtttaccttcctggaaagctcattatctctgtttgaattaacatttcagcatggaactaactgggcggaggaaggatcgttatacgtcttcagaaagttctcattgccccagctgcctagtactatacaagaagctctactttgatggcagatctaagaaggctataggcctttgtttgtaggaagcagtgtcattacattcaagcttcacttctctgattggcttccaaccactgggattcaaagagaatccaaggttctgcctatgtctgatgacataaggaaaacttggcttcctctgctcaaggttcccctctgctcatccctcctcattcagacatcctccaccataccagtgtttagaagcaaaacatgaagggctagcgccaccaggatagttagcagaaatattgtctgtaaagctaggcagatgagcccagaagaatggtcccagagaaagcagactggctccaatagatatcaggcagcaatcccaataaattctgacatgtccttggcaatggaagcctgggttggagatcctgaggcagctgtgcctactgttccccacctcagaagcttcctgcccagagagccagcagccttgggatactaatgaggatgcaactggcttattggtatgaaatagaaggtggctttgtaggggcaagcaggcaaagagtactatccacatggcaggcaggtggctttgtgtctggaaagctttgcctagccagtacagctgtgagcagaggctggttataaatttgaactccctcagcccatttgcaactctgcctctgttctcttgcattctgtttggttgccctttagtttcctagtaaatgctccttttgaaaaactccaaccttgtcttatttaacttgggggaaggggattctccaatgtcttttccaggataaagaaggaaattaaaataccatgaaaaaatggacatggcagtagaaaggaaacattctgatcagaccttgggaaaagctggtgccgagagagggagaggccaggtgtccccccacccaactggcactgattctcagccccttcctcttacttctgttggcttcaaggagacctgcccttgatgtgtgttgctgctgaagcaccctcccagccagtgagttggacatatgcagcaggcactttgatgtccaggaagtacactggtacatgacaggagcaagggtcagggaggggaggggaaaggtttctacaatgcagatgttttcaaaattctccaacaatcatgactctaaatggtatgatttagggctgggtgcagtgactcacacctgtaatctcagcactttgggaggccaaggcgggaggatcacttgataccagaagttcaagaccagtctggcaacatggagagaccaccatctaatttcaaaagagaccccccgcccccccggctaatttttaaaaaattagcaatgtacctgtagtcccagctacttaggaagctgagataggagaatcgcctgagtccaagagcttgaggctacagcgagccaagattgcaacactgcatttcagcctgggtgacagagcaaggccctgtctctctaaaaaagaaaaaaaaaaggtattgtttagttcacatggccatcagtagaactacatttcatatgatgagaagaaaataattatttattttacacttgagtcagggagactgacaaaggataggtatggaaaatggcttgctattttcatggccaccctgtcctgcaatgcggggggtgggaggggggacattccaatgacttactgctgcatgacaaagcaccaaaacatagtggcttaaatagaaatatattgtctctcatgattatctgagttgactgagcttagttgatgctctcccctgcagtctcatggttgctctcagatggcatctggggctggcatcatctgaatgcctgcctcggatggatgtccataatggcttcttcactcacatctggctctggaattgagataactggaacagctgcagaatggctggacatctctctccacatagtctctccatatggttagttcgggcttcctcaccacagggacatctcaagatagtgttctgataaagtgactggcttcctccagagctagcattgcaagtggtccagctagatgctacaaggttctgttaagtaagttctaaaggaacctagagtcatttctgccacatactagggtcaagagcaagtcataatcttgaatcagcccagattcaacgggaaagaaattacacaagaatggaatacgagaaggtgtggctcatcagggccatctttggagaaagtggggatgggagtgggagtggggaggttaatgagttaaagggcttcctaggtagctgtcattttaaaagcacatcgaatgctcaacacacatggagaatgcaatgagtaataaggggtagagaagaagggaagagctaaactggacagttaaacagtataagctaaagaaaagcaaccgattctgactgatacagtgcttatgaactttcaatgaaaacaattttatgcaaagtaatttaatgaactgagaaaaggacactaatatggatgtgaatatagccaaaaacaatgtctactgcctgtatgtggctcctgataattctgcaggccacttagctgcccctggccacccacttcactgatagccacctgggactattgagggtgtctagcttaggagtgcccagcctctggtattgccattcaaactcaacccagagaagaaggctcacctgttgcttactgtgcccttccacatccttacaaagagtatctctctcacacaggagtcctgagttggttgctggcacagaccacaaccagaggctgagtggccagtgaaactcctctgagactcaggttttctctctaatgggaattcctgactcttccttcttcagtcctctctcgggaccaaagaggaaggacacccctcagtatcctttggcaatcaccgtggacacttccgcagctatagaggtgttgctttgggatcatctaagacagagtcaagcctttggcaatgttcaggaaatgctggtatgtctctgagatcagctttcaagaggagaggcatgttatgaatggggcctttctgggatagcatacactattctttgttcgttctttctttctttcttttttttttttttttttttttgagatggattttcgctccacttcaggctggagtgcagtggcacaatctcggctcactgcaacctccgcctcccaggttcaagcaattctcctgcctcagcctcctgaatagctgggattacaggcgcccaccaccacacccagctaatttttgtgtatttttagtagagacagggttttgccatgttggccaggctggcttcgaactcctgacctcaggtgatccacccgccttggccttcccaagtgttgggattacaggcatgagccaccacgcccagccccactattctactttctatcaagtgcattccaagataggctgaccttcatggaagaagtgaaatagaaaactgaggaaaagaaaataattggaaaaaaagtcccacaagtcaagaaagtaccccaaggaagacttacaggacaacttccaaggcaaatgggaaaagagaacattggcaatctaggagctgcaggagagagccctggtcttcatccctaagcccaggatgaatgtgaggcaaaaatagtctctgttcttttggaggaagaaaaagcgagtgagcaagcaagcaagagagagagaaagagatagagaaagaaagaaaaagagggagggaggaagggaaggaagggaaggaagggaaggaagggaaggaaggaaggaaggaaggaaggaaggaaggaaggaaggaaggaaggaaggaaggaaggagcaagctctgagcagtgccacagacctgcttccagtgtccctgatataaagctctctttgctcagtctcccaagagaacagatcaagcttctcccaaggactatggcaggaacccacttccttcttccactcaaaagacttgtcacttgctgctgggatccctgggcatatgggctgcaaaattcaactagctgcgtgatcacctctgtcacctcactccctggtgtcttcccacttgtgtccaggagctctgggcctgggaaggattaacaacaaagattaaagatggcccacaaggcctcagaggatcaggagccagccctgaagtccagaaattttgactaagcctctgtcattagggtctcccagctcatccataggctaatgccaaactttcacaacagctagtggttctcatgacacctcctcctggtagaaaggaaagaataagtcaaaaggacctgggccacagattctgtcctcttgagtcattgattttgcctccctaaactatatcttaagatagattactctgtgaaagctggatgaccattgccagacaatttaaaaagtatatatatcaatatgaaatggattgatgataatattgcatattatagtttatagcacatggatggtattgcttttatccattttctttattttttgaaaattgaatttgtgattttaaacattaaagataatagaaaaattaattttttggctcaatactagatttattatagctattattccaataatttattcattgaattaaagttatttcaaaaccatttgacataggaatattgatagtttttttttctaccaagtgaacatcatcttcaagacattcacacaatttagataaaattccttttgcacagcagctgtatccagaggcttgatcttggatttagatttaaatttatcaaagaaaggcagtttttaaaatttgcctaattcaaagctcaaagactaatgaaatcctttcttcaaatacctgaagacatttgtattcagggctctagagatgagcttatgaactctataaacaactggtaagtaaaccttccagaaacaagttttacctttatagcagtacccttctctgctggtaccaattatccctcctaaaggactacttctatgtgtgaagcctcagtgggacccattgcccctcagtgggccttttctggctttgaaaagaaaagaccccagcatggtcctcaagtcttctgatgtttatataaagacggcaggtccttgtagaagtgtttatataaattaggaaagattcccccacctaccttcaacttatgaccttctttgactccagggaacaaggaaaaatcactagtttgggaaaggtagctttcagtcttgaagctgtaattatacaggggttaatgactgggaaggaagattaaacttttactcactacttgaaattattctagtgcatgatctcacttctttgggttctaatcctaaattatttgccctattctggtagttggacatagtggtggagaccagctggctcctagaaagtacaaagggaactccacccagttaccaccaagcacagtgcaggttggagacagccttttcctgaggtggggctgaggacctgctctgccactgaccaatcctgtgatttccaggcctcaccttcctagacactctctgctgtcagggatcctgccagacacttgtcagcccctggtgcagccaggtcacggccatatctgagggataaacagcactgcacctgtgactatacttggcttctacccttctgggcttaagaggactttggcaatccccaaaggactcagacacagcatgaccatgggaaacccctgcctagaacttcctgccttggcccagcccatcactggtttttacataatggtgcttggcatttctaggccactgtacacatatacacacacaagcacaaatgcaattattgtgcaggaacagctgcaaagaggctggtgcagggctccatgtccttcctgaaagtggctgaggggagcatggtcctaccacagctgggagacttgactttgtgcatccctttatagaaagaagctctctgactcttacagaagttgctgcatgggaatgccagagataaggcacctgcctacctaacacagtagtttagtcttctgagaagcctcctgtctcctttgatacctgtgaccctcagtcatggcagctcctccatcaatttatccaatgtgaggatggatgacactcacctccataacccagtctgcagccaggaaagtgtcagtagaggtgaccccacctttccaggcccatcatatgtgggtcaagaaaggatcatgtccaagaccacagcattaatgtttaataaggcttccatttctattgaaaagttgtccttcacctgcagtgtttgcaactgattgctagcctgaggaacactgggcaagaccaagatgcatcatagtgtggtggacagagccatgagctggggctgggtcccagagctctgctcctgccgctgaggctgaaaccacccctgctggtcacagtttcttctcacatgaggaagggttggcctactatgttctatgctcttccacctctggtgtctgtgtgtctgtgaatctagggaactgcttgtgcccagcactgaggaaaccgggcacctggggtgggatctatgcaatcctagacacacgctgccagaaatccaagcacaggctaactctggagggtaggttttggtgatttccacagacatcagccgtctctttaccccctccattgtttcttagtttccccttcaatgggttttcatttttaataaatggaaaggaatttgactttgagattgtcctgaaagcccttgtaatgaccagtgatgtctagcatggattataaaatgacaactggcccactaaacagaggaaattccattttgagttaaataccaaaataagttctttcaatataccctaaagagttcaccacagtcctacaggtaagccagatggatgagaggagggcagcagaaaggagagcctcctggatggggagcttgtgcacagagaagcaggtattagatgaagaaaagacagaaagacaatctgtgtggttggttcacatttggggcaggaaactgggacccacagggagggtgctgggcccctcctgccctagcctacttctttaagaaccaacctgtgatccctcccctagggcagtgatagaaatcttcatcctaggaagctcatgcctctgtccccagttcatgccactctgtgcttctgagaacatcaagacagaggtgtctggagtatcaaaagcaaaaaccttccttctccacactgcatggctcacacaagccagtgctgtccacccaccaggcctgtgtgtgcaccagactgagacgtggatttccagggccctgacgctctattgactgcaagaaccatcatgcttgtatctcagcctatgtttttgaaaatcaaactacccattccattatccatttagcaagaatatcaatcagacttattgggtgaggaggggagaagggagaaggtttgtgggcagtactttttctagatggaatacgttctcattcaagtctaaaaaggaaaaggactagtaccttggtcatagtcagatgactacctgaaaagcctctggcctttagtagctaaaggctctgaaaccaatagtttgcacaaacattgacccaatattggatctaggacactgaacaaaaatcacccaaggaggaactctctgggaacagcaggtaacccctcagctttatgtcctagggctccgttcccaccagaaaaaaaatgtttatagaaccccagagacctaacttgggaacctgtgcagcacagaccaagggtatgtcctatcctggggagacacagagcccagagaagacccagccttcccacccatgccagccagccctggccctggggtgtacttcccttcacctgcagggaagaagccaggtgaccatcaagcaacatgacatcatttcctggccagcaagccttctccagctgcagccacaccttccatacctctggattcactaatccacatcccacccccatcagcagctctcagtaatcaatcagtccccttccctgtaaccttcccactattcactcccagggcctccccaagctgtgtggatgtaaacaagatttcagaagcccttggcagagatatggttaccaggtgctgaagaaacagagactcagagtaggccacctgagcccacccagccacacctggcatacccagcatttggctagtgccagttaggaccagatactcagcctccagggagaataagttcataggaaacttcccaagtgagttcaaaagccaaaccagaatgatcacagtgagaggtgtgagcattctagggaccccggcgcacatggttattttaaagagcagagtgaggccattccaccaagtgcatgtggggcaggcagctgtcccatcctgggggctgtgggaaggcaggaccaggctcttcacttcaggcagagaatgcaccactgctaatcactgagagatttcggaccacagggcatttccagtaaagcatagggagttgagggagaatgttcagaactgagaagactagactgtgctctgagtagactgaggctaagagtgagcaaaaagggtaagaagaggtgaatggctaggtgcagtagcagatgcctgttgtcctggctactcctggaggttgaggtgggaggattgcttgagcccacgagttcaaggctgcagtgtgctataacagcacttgggaggagccactgcattcaaacctgggcaacatagtgaggctccacattgaagaagaaggaagaagaagaaggagggaagaggaggaggaggaggaaggagaaggagaagaggaagaagagattggaggaggaggaaggaggaggaggaagagggaatgggggaaaaggttgcattttggggaacttctcacttatgtcaaatcataggaagcagaatagactagaaccccctctctctccaccatgtgagaatatagtcagaagtctgccatctgaaagccaggacaaaggtcctcaccaaatctgccagcaccttcatcttggtcttcccagcctccagaacagtcagaaataaacatttgttgtttaagccacccagtctatggtatttcgttatagtagtctggacagactacgttggtgacacagcaaactgtgtgtggagatagaaggtaactaaatgtatatctgacaagaattggagatatcacaagtatttacttatgactgtcatttttgaccgtcaatgtaaacaatgttatcagcccctagttttacggggccttctagagggctctctcctgactccctaacacaattaattgaagatttttaaatgattccccaaatatatatcattatccactagaaaaatgttcacttgcttcaacatcctcttgcccaaaacttctcagtcagaaaactgttcttaatatcgaatttaaactccttcttcaatacatctattccttttattccaacctgaagcagaatttagtcatgaaattccacagattgctccctataactccactctcacatctttctcttttacataacccaaagatttggaaagacaagagtagacaataagcaaatgaatatatctgggagaacattatagtacttaagaaagaacactgcttcatgcccactcagcacctctcactcatgtgacctcacaactggattctcttacactattttctgagtgtgtgtgtgttctagtaattgtaagttcctgaaaggcagagccatgtcttctaattttcatagcactttggctcaagaagtcaataaagacatgtagccataagttggcacacttattaaaaccattcttattctttactttcaataaaaccagactcctaaggaccctagctctgattttcatacagactgacagatactaactctgaaatttgtaacaattaatttggtatttgaggcctgcccttcttcattcagtgccctctccctcaccccaagtggtctgcatttgggaggtgtgatggtccttaccaaggtctccctggacagtcaccatggagtctagagggtttaggttcatcttttactgtctctgtgtgatgggggaaggtggaaagaagatgatttcctcttaaatggtggaagggcctctcagatttcatgtggattataatatgattttgatagtcgggaaaaaaaaactctttacggactaagaagaaacaagatgatcctcataccctgaaaagtcctttccaaccttctctgtcaaacttctgttcttcccttggatgcaaatgcatgacagagcttgcagtgagctgcagaaagtgttgggaaaaacccagagatgaagagaatagagacttccaagagagcgtgtagtcaaacatccacccctgcctatcccagtgggtcccacaggtctctactggagtcatgaggtggtgtgtcccctactcattgctaagacccatgaacttggaggagacagtccaggggccatgatctggaaggggctgaagtgaagcagaataacaaacccacatccagttctagatcctgctacacaggagagccaaggcaagtcatggaaacaggttatgatcccaggagagagacagagagcagctgagtgagcaaaatagggggcagcctcaaatgatttctgaagcataagtctaaacctaatgccaaacagggctttttcatctgctcagagtcttagcatgagaattagcttcctttatttacaaagattggacagagacagggaaagggagacagaaaatataacaacagacacaggaactcaaaatccctagttttccttagccagtaagtaccaaggcagacatttctatatacttaataatctctgaaaggtccctatacatgatacaatagctgatatccatatggtcatcttacgacattaagaaatgactttgaaaaagtaagtttgaaacacgcttgggaagatttccattaaaatatttaaagttaaaaaatgttttggcatcactttttgaccttttggctaaagtcaagtataaaaaatgttttggcattttcccaagggaaaaggaatctcatgttttctgaaaatttatttatgaggactgtctcatagagaaatgagatgacacatccacagtatcgcatggtttgtaaatataacattaccaagagccttgtcttcacaggtatgtgggataggctgaactagagaaatcacctcaaatctctccagtttgctaagggctagagacaattgagcccctcaaaaatatatgatttggggtctgtactaaaatctattaagtgggccccaataatagggctgaggaacttacgtgcatccatgcaaacttccaggtgtctttcaaagaggccatcaggtaatacaacctggttgcaaggtgggggagggatgaattatataaagggccagttctggaggcagacataagcccaggccaagaagaaaagtaccgttggttcaggtgttagtctaggcaagggcgatcaaacagggctgcaaaactgagtaggagatacattgcaaaaaaagcaggcggccgagattggaactggaagaggcaatgctcaatgttcaatgcttacagggagcctcgctggtcagagctactttttttgtttgttttgtttttttgtttttgttgagatagggtctcactctttctcccaggctggagtgcagtggtgcgaacacagtccactgtagcttctacctccccagctcaagcaatcctcctatctcagcttcccaaagtagctgggaccacaggctcatgccaccatgcccagctaattttgtgatttttcatagtgatggggtctcactttgttgctcaggatgatatcaaactcctgggctcaatcaatcctcctgcctcggcctcagagcaacctttaaagggctgtctgtgtgtgtctccctccataaggaatgtaacacatactccctcctcctttgcctattgattactcacgttatagatcttagcttagatgtagttgcaaagacttccctgagcctgagaaatctacatgttcttgggaaggaattggcagacaatcaaggctcctaagcagggaaattacacaatgaggtttgcatactggctccctcactctggctacaatgctgacactagacttgaaggggtcagaagggagcctgttgtaaacaacacaggatctggccatcaacctgactccctctcttgcctctcattcaatcactaaccaagctctggcaattctacattctaaatatttctcagaggcaaccagttagctctctctccactgtcacaactctagttctggccctcatcattctcttttcagattattctcacagcctcctaatccatctcccaccttgaatttagtcttgccctccaatccgtccttcacctggcctcaagagagacctctgtaaacacacatctatttatgtgttattcacttgaaactctaattgctgtctcactgttcttaccatacacctaaaatgtttggcatgtcctacaaacttggcaaggtctggcttctgcctaacctactgaagtagacactgatgcatctcccaaatttactctttaggaggacattcatttcccagctgtgcaaactattaacaactcacagctgagtccctttccaggaattgccctcatccaaagaaaagtgcctcactcaagattatctactctccctccttgggcacagctttcatccaatgactgcttgatgcgggagtgccaaggtctggtttccttgcctcaatttgggacatatccgatgggccctcctatctccagagcccctcatgggatcagttgaggcctgtgttgcaactgcatggcagtttaacttctctctttgcccagtcatgcatccttcactccccacaggtgttccagacagcacacctgaagaaacatcatgcatgtaaattggtctcagactctgtttcctggagagtctgacctacagtactctcccagcaacattactcggacatagaaaattcatatggaactttaacagttcctcaagtccgctgagctctctctgctgtatgggtttttgcacaagctatttctttttccctagagcatttcctacctttttcctattcaccttcaagtctcagctaagatgtcacctcctttaggaagtcctcctgattcaccaagctcaggtgctctgcctttatgttgtcatgacatttagtactacctcatcaatgcttaattagacaaattataatgcattctatttatgtatccatgtgttatctcccctgctagactacatctttttttttttttttgagacagagtctctctctatcgccaggctggagtgcagcggtgcaatcttggctcactgcaatctccacctcctgggttcaagccattcccctgcctcagcctcccaagtagctaggactacaggtgtgcgccaccacgcccagctaatttttgtatttttagtagagatggggtttcaccatgttggccagaatggtctcaatctcttgacctcatgatccgcccgcctcggcctcccaaagtgctgggattacaggcgtgagccaccacgcccagcctagactacatcttctaagggtgtaagaaatatgtctattgtgtccatcattgtaaccctagtgcctagcccagttcctggaacacactagggatataatatgtattagtttgcttgggctgccataacaaaataccacagactagaagcttaaacaacagaattttactttctcatggttctgaaagccagaagtcccagatcacggtgtgggcaggtttcatttcttatgtgctctctctccttggctagcagatgatcacattcttgctgtgtcctcatatgggcttttctctgtgcactaacattcctggtccaaatttcctctttgtataagggcaccagtcacattaaagtccaccctgattgtctcattttaactaaaacacctttttgaagaccctaactccaaatataattacattttgaagtcatgggggttagggctctaccatatgaatctgggggcaacacacttcagcccctaatagttctatgtttcttctctttccccttccacagtgctgtctgtcccagaggcagcaagcccacagctctcaccaagcaccaatgcccagattagccttcccctcaaatttccaagattcaggattcaacatgttacaggtattattctgcctggaatggggtcaaataggtggcaggaggacttgaagaattcactagttacaaaggggagagacctttcaggctgaggaaactgcataagcaaagataccacatgttaaatttcatggggagcttggagacaattagatgtggctgttgtggaggatgaatgtggtagatgccaattgttgaaggaagaaaggttgaccgaggttatacggtaaaaagctttcattttggcataaaatcagccaacactttatctaaagagatgaagatagggaattagaggctgttccaatcactcatgcaggaaacaatgcaattaacttggtaaaaggttggaagatttgaagatgacttacagcaaataactatcaggaagggggaagcaggagaggtatgacaagcaaaagataaagggaaaaatagaggcaaagagaaaaaaaaacagaaggaggaggcatcctgttcatatctaaatgacgaattccaatatcccagaagggattctgttgactggggttctgcatcctcaaaaaggcaaagtctcctccagactttgctggagttgactagcatctctcagcaaagtgagggagtactggaagcagagaaggctctagatatcagaaggtcggttaacgtggaggcacagcagcaaatggagccaagagggatgaaggcagcaaaaatttccaaaaggaactggagatctggatgtgatcagcttcagggggctaactgggatgagagaattgatatatccggctccttctcatttagagaaaacagtcagctcaggcctggcttatagattaaggaccagtcacctggatccaaccacacagaggaaatagtggtggatataaaggagcttatttcccctctcaggataccggggtagaaaagcggaaggatcagacacttgcagaggagaaaagagaagtcactgtgcttgtccactgtcctggctagtaatagcaacggtcaaggccagaggttacgtgtaatgaagacagtggagctaactgatttcgtccagctgcaggtctaggtgcggcaggccatctttttcacccttatccacccggcacccactgaggagggactgttctaataaagatggcttcagtaggccactgcgagtcaaggctgggtctgtctccaaagtgagtttggtttttctttatgaaacctctggtcacgagaatatgagagtttccactctggttctgaactatgggtcatcaatcctaatgggttatgggttccagctgtgagatttgctgtccctgtttgggattacaaaaagtaaatgaagctctccagttaagaccaggtgtgggcagtcagagctgagaggccaggagtgtccctctgaagaaggtggtgaccgcagagaaagtggtgctgggcctgaatcactggtgggcagagatggtgcctgccagtcctgagccaacctctttggagcccactccacagagataagagcaacagcagccctgaaagcacctcaaggacttctgctgcaaccgaggcttcccactgcatttcccccttacagactctccagtaattctttagactctgtaagtatggcatgtgtatttcattgaaaaagtaatgtaagcatgctctagaaaacccaggaaagaactacccacaccaccaccaccgaaaagttaattagatacaatcagagttttcctccactggaccttatccatcttagttcacagtctcagagttaggacttgaggcatttgtggaagtaaatcaactagagcacccttaagactttattcaaaaatgctaggcatgagtaatttcagagagaatattctcacttggagaagcagcgtgagccagacagaatttttaataaggatttaggaggcagggtcagctgaagttcaactggtttagggaatagtgcaaagatggttctaagaaatatgaggaattgtttctaaggatgatgaactactgtttgggatttttaccgagagggtgaggaggaatagttaggagctgtggccatatggaagaagggtggggagaaatattaccgggcataaggaagtttaaggaccaccagtggaaaattctcagtctatgtgtctcttttaaaaaaattttgtggatacatagtaggtgtttatggggtacgtgaaatgttttgataaaggtatctattagcgtctcttgtgaggaccaaatggaaacacaggccttctgactcctggagagcattcttttcacattccatagatgccccagcctttctcagtttggcaggtgattgagaaagaaccccaaggcgtcctggcctttcccatggaaaggcaggttgagataagaagagggctggactgcacagacaaattcaaagattttaccaccttgtcctagggttataatttatcttcaattggaccagggcctgcaggagtttagtcctacatatttctggcctgcagctacatgaagggaattctgcctccagtgattgagaaaactcaaggatttccttacaaaggcgtttcactttttgatggcttgaccctggaagcatcactgtatcaatgattgttgttgttcctcttaatcaaattattctcagctccatcctgagatgtttcagctgacagcctggatggccaggcctgtagcccattgtacctttctgcccaaggggcgatgtagccctgtgcactggctgttcagagatagtggtagatccatgtttatttttcctggctgtgcctttaagagctgcaggaatgtgaagggagtctggatgaggggtggggtctcccaataggacttctggaaaaggatcctgggaatttttgccagaaactaaactgagagtccaactttaaaaagttgggggtggtttgtgttggggaaggcctgcgattggactgcagaatccactagggaggaggaaagcaaaagtaaaaaggaaatagctgggggaagggaacggggggaagccatcttcaccccccaccccaatgcacacacaattaagccaggaagcagcttgcaaccactagcctggggagggtccgcatgtgtcaagggtgagggcaacagatgctggacccagggagctctctgccacaggtcagtctacaaggcctcagggaccaacttgccaacagctggacttgatcactagctggcaaactgagctcacgtatcgggtggaataacaagcggactttgctctctgctgtgcaaaacgctgtttttagaggatttgccacagcagcggatagagcaggagagcaccaccggagcccttgagacatccttgagaagagccacagcataagagactgccctgcttggtgttttgcaggatgatggtggcccttcgaggagcttctgcattgctggttctgttccttgcagcttttctgcccccgccgcagtgtacccaggacccagccatggtgcattacatctaccagcgctttcgagtcttggaggtaggtggcatctgtacaccttggataagtaacaggcttcccagaagtaccttatttttacccatgcttctctatctactgggttgtatttttcccagatagcaaatgacacattgccaaagttacactttaaaatgctcatagtctggcagtttagagccgaactccagagtccagtgtgctacttccagaccttaagcacagttgcactttgtgctctgatttggcagtttgtctcatctgtaaaatggggataatagtagaatttatgttgtaaggctatcctgaagatttaatccatagctaaaatactgcctggcataatggtatgtatctaaaatgttattattcaccatagttcattttttaaaatatgaaacttaaaaatgttggttactttttcttcatgttttagtgtttcaggctgataatggatttcagcttttcgttttgtcttttatgataaaccattaggtcactgtaaaaagtcatgatatcaatgtactgagaagtcttagtttcttttgctgaactggatttagacttagaagtgagcagatttcagccaagttaaacagaaagaatgcatttgggctgccacctcattaaaatgtgcaaaacccaacattttggcagcctggacaggctcccagggacaaatgtaaccctccaccctagcctttgccacaccctggcattgattattcatacttaatggcttgcttttgtacaagctaaattgataaattatttatcttctttcaaagaccctcttattgctaataattattttatacattttcctgaaaaatcttcatgtccaaattatatgttcttctagttatagtcagggtaaagtaattccacatagcaggccgaatgcatttcctaagggcgtccagccaacaggctggggcctggaggcagtggatgaagtgttcccagacgagcggcctcttgcgcttcttcacttgctccctcctgagcctcacctccttagaagtgccagaatgatgctcagtcaggatccctctgcatttagcaccgacttgccttgggagtaaagccagccaaatccctgcaaattgtctttcactaccttaagaacttgtcaagggtatgaagtacagactgatccttttatagctatgaatgtggatttgaaaaagacaaggatatgatctgtatagatcttcccaccccagtcctgacctgaggtgaagccaagtcgcaggtggcagtcactgttggccagcgcagacacttaacaatacagtgatagcattcccagcctgagaagccagtgtcggaggggtaggaaaaaagagggtagggatttagggaattattttgggtctctctttctgtctttctcccttcaaaataaacagccttacgtattgttgtttggagcatacatttttacatttgtggatagaattttgataaaccatgccaaatgagctttaagtagacattctctttgaccaagcaatcccatttccattcatttattcttttgttcagcaaatatttattgaatagtattatgtgcttggccctgtgccaagtgctagggacggatattctggaaatctaccttaaaataatctgatgaagatgtaaatacaaaggtttttttttcccttaataatctgatgaagatgtaaataaaaagtttttttctcagcattgtttgaatgacaaaaaattaaaaactatgtaaatgtacctcaaaaagagtctaacagaataaataatgggatatcaattaaatggaatgctctcattaaagttatggtataggtatactttaattagtatcaaagtatgttcacaatatatctgcaagtgaaaaagatgatacaaaacatatagtaaaatcacattttaaaaatatatatttacatatgtatgactaaatgcttgggaaaacttttaaaaactgatatactcaagtatcaatactacctttgaatttaggaattatgggagatttcaatttttcccctatttgatgatgtgtaattttctaatccttttctataaatgataggtatttatattatttgggtaatttaaataacaagcaataatttgcaaatttattttctgactgaagcaagggctggaaaaatgtacccaagcaacgagggcatacattcaagaattccaagagttctcaaaaaatatatctgtcatgctgggaagatgtcagacctacacaagtgagtacaagagtgcagtgggtaacttggcactgagagttgaacgtgcccaacgggagattgactacatacaataccttcgagaggctgacgagtgcatcgaatcagaggacaagacactggcagaaatgttgctccaagaagctgaagaagagaaaaagatccggactctgctgaatgcaagtaagaaaactgcatcttttcctagcccttctagggactattatgctcagaaacacacagactcagagcagtcagggagcatcatagagtaatgagagtaagaattggaggtgtgcttttgtgtgcattgctgagagagaaagctatacagagaacaggtgtccaaagagaaatccattctcgcaaagccattctttctttcacacacagtgcctaaagcctccatagatggtgaaggctatagtgccaaaagtcagcccaaagagactacctcctgataaatcttggtttggtggagatgtgtggtcccagattttttcagggaaagtagcagtttggtggattctacatccagtacccaggctgtagatagcatctgcaaatgtaccaagaaacagtcttaaattggaaatggcaacagccaaccctcagggatgggaactgcagtgaatcactattgtgtgtgctgtctgagatggtgatatgcatgggatgtggtctaatcttgtgatccatcagaatcacttccaagccattaagaataatgtgtagcagctcaaattataataaacagtatcaggcaataaacacacaaatgacaaagaaaaattttctgtgcccgagtct

SEQ ID NO: 5678 - DNA, 94108 bp, Homo sapiens
  KAI1 gene - 44543784 - 44597891 of chr11; NCBI Entrez Gene ID: 3732; Build 35; sequence includes 20,000 bases upstream of initiation codon and 20,000 bases downstream of termination codon of the gene
aagtagggaactctgaatttaatgttgcagcttgggaagctcaaaaaggttctaatagtctattttcttggttagctgaactatggattaaaagatggcccactgtgagtgagctggaaatgcctatctcccttggcttaatgtagaggaagggatccaaaggcttggggagacggggatggtggagtggtttagtcacttcagacctactcatcccagctgggaaggtctagaagatatacccttgaccaatgccttgtgaagtagatttgtaagggcagcacctgcatctctggagagccctgtaattgctcttctctgtatttcagatctaatggtgggaactgcagtcactcaactataaaatttaaatgcaatgagaataagtggatcctgaggtggcaggggccaagtggcagcactcaacttccaaaggcgaggtgggcatagctactgtaatggacagcagaggcaaagcagcaatcagaatagtctgactcttttagagctctggcataggctaattaatcatggtgttcctagaggtgaaattgataggaagcctactgcatttctacttaaattatacaagcagaaaacttctaggtcaaacggacaaaaggctaatttgaattataaaaacagagaatcatggcccctcaatcaatttcccaacttgatttacagacccagccagtttacagacccagaaccctttgaatgaaggggaggccgggtcctcttgaggaaggaccccactacattacccacaatttatgcattgaatctttctcccatccttccccaaggagacctccggccttttaccagggtaactgtgcactggggaaagggaaatgatcagacattttggggactactggacactggctctgagctgacattgatttgaggggactgaaaacgtcattatggtcctccagttagagtaggggcttctggaggtcaggtaattcatggagttttagctcacatctgatttacagtgggtccagtgggtccccggactcatcctgtggtcatttccccagtgccagcatgcataattggcatagacatacttagcagctggcagtacccccacattgactccctgactggtagggtaagggctattatggtggtaaaggccaaatggaagcccttagagctgcctctacctagaaaaatagtaaataaaaaacaatatcacatccctggagggattgtggagattagtgccaccatcaaggatctgaaagatgcaggggtggtgattcccaccacatccccattcaactctcccatttggcctgtgcagaagacagacggatcttggagaatgacagtgggttatcgtaaacttaaccaagtggtgactccagttgcagctgctataccagatgtggtttcattgcttgagcaaattaacacatctcctggtacctgggatgcagctactgacttggcaaacccctttttctctattcctgtccataaggcccaccagaagcaatttgccttcaactggcaaggccagcaatataccttcactgtcctacctcaggggtatatcaactctttggctttgtgtcataaccttattcggagagacctcgatcactttttacttctgcaagatatcacactggtccattacattaatgacattatgctaattgggtccagtgagcaagaggtagcaaacacactggacttattggtgagacatttgcatgccagaggatgggaaataaatccgactaaaattcagggactttctacctcagtaaaatttctagggttccagtggagtagggcctgttgagatattccttctaagataaaggataagttgctgcatttggcccctcctacaaccaagaaagaggcacaatgcctagtaggcttatttcgattttggcggcaacacatttctcatttgggtgtgttactctggccctttatcaaatgacccaaaaggctaccagttttgagtggagtccagaacaggagaaggctctgcaacaggtccaggctgtggtgcaagctgctctgacacttgggccatatgacccagcagatccaatggtgcttgaggtgtcagtggcagattggggtgttgtttggagcctttggcaggctcacataggtgaaccacagtggatgcctctaggattttagagcaaggccctgccatcttctacagataactactctccttttgagagacagctcttggcctgttactgggctttgatggaaactgaaactttgactatgggtcatcaagtcactatgtgatgtgaactgcctatcatgaactgggtgctttctgacccatctagccataaagtgggtcgtgcacagcagcattccatcatcaaatggaagtggtatatacataatctagctcaagcaggtcctgaagacacaagtaagttacatgaggaagttgcttaaatgcccatggtctccactcctgtcaccctgccttctctccccaagcctgaactgatggcctcatggggagttccctatggtcagttgacagaggaagaaaagactagggcctggctcacagatggttctgcgcgatatgcaggccccacccaaaagtggacagctgcaacactgcggcccttttctaggacatccctgaaggacagcagtgaagggagaccttcccagtgggcagaactttgagcagcacacctggttccacactttgcatggaaggagaaatagccagatgtgcgattatatactgattcatgggctgtagccaatggtttggctggattgtcagggacttggaagaagcatgattggaaaattgatgacaaagaaatttcaggaagaggtatgcagatggacctctctgagtggtcaaaaactgtgaagatatttgtatcccatgtgcatgctcagcaacaagtgacctcagtggaagaggattttaataatcaagtggatgggatgacccattctgtggacaccactcagcctcttttcccagccacccctgtcatagcccaatgggcccatgaacaaagtggccatggtggcagggctggaggttacgcatgggctcagcaacacggacttccactcaccaaggctgacctgcctggctatggccactgctgagtgtccaatttgccagcagcagagaccaacactgagccctcgatatggcaccattccttggggtgatcagccagctacctggtggcaggtttgattatattggacctcttccatcatggaaaaggcagaggtttgtcctcactggaatagacacttactctggatatgggtttgcctatcctgaatgcagtgcttctgccaagactaccatccatggactcacggaatgccctatccaccatcatggtattccacacagcattgcctctgaccaaggcactcactttatgactaaagaaatacagcagtgggctcatgctcatggaattcactggttttaccaggttccctttcatcttgaagcagctggattgatggaatggtggagtggacttttgaagtcacaattacagcaccaactaggtgacagtactttgcagggctggggcaaaggtctccagaagaccatgtatgctctgaatcagcatccaatatatggtactgtttctcctgtagccaggattcacgggtccaggaatcaaggggtggaagtggaaatggcaccacttaccatcagccctagtgatcccactagcaaaatttttgctccctgttcccatgacattacgttctgctggcctagaggtcttagttccagagagaggaatgctgtcactaggagacacaacaatgatttcattaaactggaagttaagcttgccacctggacactttgggctcctcgtacctttaagtcaacaggctaagaaggaagttagtgttgttggctggggtgattgacccagataatcaagatgaaatcagtctactattccacaacggagataaggaagagtatgcatggcacacagaagatccattagggcctctcttagtattaccatgccctgtgattaaggtcaatgggaaactacaacagcccaatccagacaggactacaaatgacccaggcccttcaggaatgaaggtttgggtcactccaccaggaaaaaaaaaaacacaacctgctgaggtgctcgctgaaggcaaagggaatacagaatgggtagtagaagaaggtagtcatcaataccagttacgaccacatgaccagctgcagaaacgaggactgtaattgttatcagtatttcctccttcttttgttaaaaacatgtttgtgcatgtatacacttgtactaagaaaatatcttcattttatttccttttccttcatcatgtgacataagatttattgacttaatcatatcagcatttaaatattgttaacttatgtaatagtatttgggttggggattggcgcgtttctggttgtatgaaggatagctgtattatgtcaggtgtaattatgacttcgttattgtctttatttggagattatgtatgacctcagaagatgtgtatgcattcaagttgataaggggtgaacttgtgacggttaataccgagtgtcaacttgattggattgaaggatgtgatattgatcctgggtgtgtctgtgagcgtgttgccaaaggagattaacatttgagtcagtgagctgttgaaggcagactcacacttaatcagatgggcaccatctaagcagcctccatagaatataaagcaggcaaaaaaacgtgaagcgatgacactggtctagtctcccagcctgcatctttctcccatgctggatgcttcctgccctttaacattggactccaagttcttcagttttgggacttggactgcctctacttgctcctcagcttgtagatggcctattgcatgaccttgtgattgggtaagttaatacttaataaactcccctttatatattatgtatataatatatttatatataatatattatattatatatttatatataatatatattatatatttatatataatatatatattatatatttatatataatatatatattatatatttatatataatatatatattatatatttatatataatatatatattatatattatataaatatatataatatatattatataaatatatataatatatattatatataacataaatatatatatttatagtatatataatatatattatatatattatataggattgatatatgatatataatatataatacatataatatataatatatatataatatatatacacacaatatataatatatatataatatatatacacacacacacacctctgtctatatatatactattagttctgtccctctaagagaagcctaaccaatatataacctatgcatattcccccatatacttcaaataatctctagattacttataatacctaatacaatgcctacacagcacttcattcacatgggttgaaggtagtactcagcacttggcaaattcaagttttgctttttgggactttgtggaattttctttttctttttttgacagggtctctgtcatccaggctggagttcaatggcgtgatattggctcactgcaaccttcatctcccaggttcaagcaattctcccacttcagccttccgagtagctgggactacaggcatgtgccactatgcccagctaatttttgtattttttagtagagacagggtttcaccatgtttgccaggctggtctcaaactcctgacctcaagtgatctgcccaccttggcctcccaaagtgctgggattatagtcatgggccaccgtgcccagccaattttgtggaatttatgtctccaaatatttttattgtgtggttggttgaatccatgaatgcagaacccacagatatggatagagggctgactgtcagcaacaataacagtagtagtagcagcaacagtaataacagcagtggtggtgattagaactgtagcaggagcagcagcaacaatatttcttagagggcatcatttcctcttgggattctgacctgacagtccatggactgagagtcattccatgggtgggaatagtgatggcaaagctactgttgttggtaatgaagatgctgataataattgtgatgacgatgatgaagatggcagtgatgatgtcgatgatgtcattcatgatgactttggttaatgcagtgatgatggggatgatgatgatgatggtgatgatgacaaacacaatagagatggtcttggtgattgtgaaggtggtgatagtggattgtaatggtagtggtgagaatgatgatggtgttggtggtgacgctgatgacattgatggtgacattgatgatggtgacaatggtggtggtggtggtgatagtgatgatgctgccaaagttaacttctgtcttatgttaatatttagtttggtgggcccagctgagaatgcagttgaaatcctgtctcctgtctttgttgctcgttctcctcaatatttggctgctaccttgaggtctaatatggctgcttcaactctaaccatcacatctccattctagccagtgggaattcagagaagacagggagggggggagcaaaaggcagcctcttgttctttttttttttttttcattctagctatattttcatgggttttgtgtgtgttttttttaaattttttatttccataggtttggggggaacaagtggtatttgtaacttacatgagtaagttatttagtgatgacttgtgagagtttgatgaacccatcacctgaacctcttgtccttttaagggcataacctggaaattattgaaatagagctcagataaaactttcttttaaatactgcagtcatggataaagtttatcatatggcccagtgacctgatacctaaggaccccagcaagcaaattcctcttagacccaggataaaggtgagctctcctggtgaactagaacgttttcttttttctagctctttcttcatttcttcttccttcactgccagcaaagtgcttgggctccagaaacagcctgcaggcttcctgactgggctggtgataaaagggccacactgggatctgggactggcaccatagacttggggccctaataagggataggaaagccttctagcagaatggaagggagagatcttggcagatagcaaatgttgggtctgcttcttaaaacacattcctagtgggccaatattaacatgtgatgtcactgtttgaaatactagtgctatggtttggacgtgcatcccctgtaagattcatgttgaaacttaatccccactgtggtggtagtaagaggtagtaatcacttctttttgaaaagtgactaaatcatgagggctccatcctcatgcatggattagtaccttataaaaggactggagggaaccagcttagcccttcttgcacttccatcccttctgccatgtgagggcacctaaatggcaccatctatgaggagcaggtctttgccagacactgaatccaccagggcttggttttggacttcccagcctctagaaccatgagaaatctatttatattatttagaaattatgcagtcccaggtattttgctatagcagtacaagtggactaagtcacctcgttaagacaatggaacaaggaatcacaaagacattttctaactttggctctagcacaaactgttttacagccttaggtaatcctctgattctgacttttctcttttttcctcacatggtggagagagaggaagagctccagtgtcttttcttatgaacacacgaatcctatcagatcaggtccccatctttaccacctcacttaacattagttccttccttagaggccccatctccaaaaacagccacactaaaggttagagttttaatatgtgaatattagaggggacataagcatttaggacataatactaacctatccaaacatcccaatcgatttatccaatatcatacaaacatacacagtattacaatccactgaggacttctgcataatagagagcatctgaaacaccaatcgcctaattacccaaccctcaatggagtcattagtgggtttgtgtgtctgccggcttaggaactctttggtggatgatggttttttgtctaccacttaatctgtttctctaggtttttagaaaacacctgttgtgctcaggaaatgtggtggtgtattccagaaccaacaacacttttataaccattctttactttcttattcatgaaaaaaatatgcacagtatgcagagtcacacaagggccaaatggaggctcacgagtgcatttctttcattgctgaatatttctatgagtgcttaaatttcccaggtctcctggctcatctgcttcctccacaggctcttcctctttcttaggcaacagttacacctaataatgagaatgagcctatggtaggccaggcacagtggctcacgcctgtaaccccagcattttggaaggccgaggcaggcggatcacttgaggtcaggagtttgagaccagcctggccaacatggtgaaaccccgtctctactaaaaatacaaaaattagccgggtgtggtgatgggtacctgtaatcccagctactcaggaggctgaggcaggagaatagcttgaaccccagaggtggaggttgcagtgagtcaagattgtgtcattgcactctagcctgggcaacagagtgagactgtctcaaaaaaaaaaaaaaaaaagagaaaagagaatgagcctatagtggtggttacacactacaccgtgaacattggatgcagacctcccggaagaactactgagatacaacttagagtcacgtgtcttcttgcagtatccacccacagcccaaatggtctagcctccatttttgtgtgaaatcattagagcaggctttctgttcatgagtcagtgctatggtctgaatgtttgtgtcccctgaaattcatatgttgaaacctactccccaatgcaatggtattaagagatagggcttttgggagataatttggtcatgaaggtttcacctctgtgcatgggagcagcacccttttaaaagaggcccaaggagcttgttagccctttcagtcatgtgaggatgtagctagaaggtgccatcttggaagcaaagagtgggccctcaccagatgccaatctgctggtacctcagtcttggacttcccacactccagaaccatgagaaataaatttctactgttaataaattgcccagtctaaagtattttgttacagctacttgaacacactaaaagtaaattttgggtaaatattttttcaaatcatgatggcaaatatgtacatatttttatttacatataagttatatataatatgttataaatattatatataataggtatccaaatatatattcaagagggcaaaggcattgactgctatatcctcagtgctagaatatcatccaggacacaggaggcactcaataaataatttgtgaaatgcagaagtgaaatacagttgaatgagagctactatgaagcatgatttgtggcattcagtgtctttgtaactgatgtacctggtagctctgctccccagaatccagctatcagtgctagaggaactggtatgggttttccttttctccaatgagtcccttcccatccctgtaagattagacagccccgcccattgtcatgtgactggcaacaactccctctgggaggacacttctctgcccatgatatggagctcagcttcataacttgccttaacaaatggcatgtaggcagaatgacagataccacatctaagcaggagctttgagagccaccaagcggcttgaccactgcttcttcttttctgtcccatgagaagaccctaaatagggacggattttccatcttggatctgggaataacaaagacacatgaagcagagtctcacgtgacccacagcaatctttagcggccatgtaacataagtggggaatagggcctttgttgatataaatcaatgagatttggggagttctttgttactgcagtataacctcacagaagctgtgactctccagccaaccccagccccatgctcaacaattcaggggactttgcaagagccattaaataaaatttttctgcaaaaacaactagatttcacttgccatgcttataactaatacctactgtgtttaatgttatttcatcatgattattaaatgcggtgactttaggccagctgtctcattggcttgtaaatcccacgcctcaaaagtgtccttatctgagctgggtgggtgtctgcagttgaaacttggcgtagagacctaattccatgtctgccctcacctggccctgcagccagggggattaaactgagaccatgaggaatggggcagcccctattcccctgcctccaagtctttcatctccaagcccccaactttttttttttttttttttctgagacagagtctcactctgtcacccaggctggagtgcagtggtatgatctcggctcactgaaacctctgtctgcaagattcaagcgattctcctgcctcagcctcccaagtagctgagattacaggcacctatgaccacgccaagctaatttttgtattttcactaaggacggcgtttcaccatgttggccaggctggtcttgaactcctgacttcaggtgatctgccctcctcagcctcccgaagtgctgggattgtgattatgggcgtgaggcaccgtgccagctgatttttttttttttttttttttgagacggagttttgctctgtctcttgggctggagcgcagtggggtgatctcggctcactgcaacctccacctcctgggttcaagcaattctcctgcctcagcctcccgagtagctgggattacaggctcatgccaccacacccggctaatttttgtatttttagtacagacagggtttcaccatgttgcccaggctggtcttgaactcctgacctcaggtgatctgcccgcctcaacctcgcaaaatgctggggttacaggcatgagccattgcgcccggccttcaagccgctcttaattggctgcactgagcgctgtggtggacaccagagggcgataaatgctcattttggagaaaagagtgatgaggtttttggttttatttatttttttctcctctttctcttcatttctgttggtaaaaggaatgacttggacacaactaactagtgcatctcatagccctaaagtagcaaatattgtatgtgcattgcctgcagcgtaagcagtgaggaaacaaacccagagaggtgaaggtcacatgtgcccaaagtcacatgttggaaagttaccagagcaaggacttgagctaaaccatgtctcacagaggagggcagtgcaaacatggcagttttcacagggatcatcctggaaagtggtgtccctgtcttcccgctaaggtctgtgtggccctgccagctactcagaatgctctcaatatgaacatgaattcagccagtattgctccccggattgcaaactcagttccccatgggaaccaggcaggtcacaaaaatgagggaagcaggctagatgagccataggcacagtggggactgtagccagctggaggtcatatgtcgcaaataaagaggtcagccacaactcaggtccatccgctgtggccccgttggaaggcacagcaggaggctcagatgtccctatccctatacatctaaaaatcaacataaaattccccaatttttaaatgctggccacaaattcaaaactttttcaactcaactaagccttggccttctcaactgtataagggagagaacgtctacaccatcagcttcttgggccacaggtgtgttcttttagatctcaggcctgattcagggaaagatctccccactgatatagtgcagctccaccgaagaacagctgtgagagttcccctttctgcagcacctcctcatccatctcaggggcttatgagtgcaggcatacattgctttttattacgctttacagataacgtgttttttacaaattgaaggtttgtggcaactgaactgagcaaatttgtccgtgccatttttccaacagtatgcactcactttttgtcagaattttggatcaattttttttttttttgagactgaatctctcgccctgtttcccagagtgcagtggtgtgatctcggttcactgcaacctctatctcctgggttcaaccaattctcgtgcctcagcctcctgagtagttgggattacaggcgcccgccaccatacccagctaatttttgtatttttagtagagacagagtttcatcatgttggccaggctagtctcatactccacacctcaggtaatccatccacctcggcctcccaaagtgctgggattacaggcatgagcctccacacctggccaggatcaacagtttttaagtaaggtatgcacattttttagacatgctattgcatacttaatagactatggtggagggtaaacataacttttacatgcattaggaaaccaaaaaaatttgtgtgtctcactttattgcaatattcgcttcagtgtggtggttgggaaaggaacctgcaacagctccaaggtgtgcttctatctggagactgaaaaagcgctgcccagagtagtcccctttcttctgctttgctcttccaaaaatccctccctaaaggcgtggccgatggtctccaatgtgatccgctggggttcaaggagaaaataataggactgctttctgtttattttatagatatatatatacaatattttaaataattatcatttaaaatttttgttttttggccaggcgcagtgactcacacctgtgatcccagcattatgggaggccgaggtgggtggattgcctgaggtcaggaattcaagaccagcctggccagcatggtgaaaccccgtctctactaaaaatacaaaaaaattagctgggcgtgagtgaaacacacctgtaatcccagttacttgggaggctgaggcaggagaattgctccaacccaggaggcagaggttgcaatgagccaagattgtaccactgcactccagcctgggcgacagagtgagaatctgtctcaaaaataataataataataataataataaataaaataaaatatttgtctttgtgcatagttcatattatgcaaaatggctaataaaatagtacatacatatctattataaacaaatgacatatattgggatgtatataaccctaccatgggtttaagctgatgcctaaaaagaaaaataaacgggtagaacagggaatttggggagggggggacatgatttaatagtttcaaagacttacccaagtgccacagttgtaagataaatataaataagctttagaatatgtaaagtgctacgcaaatgctagttatcaaattagttaaatatatttaaattagttattttacagcttacttttaaaacggtggctgccattattagtgtcgtagttgctatggcaacatggcaatgtacaggggctaaaagccccctgaagagtaacccctggaccttcagatgtagtaggcggcagggcaggatttgagcaggggcctcactgatctttctgaaatgactgagacaggaacaaatcaatggctcagtgtcttctgtgggaactcagcccctgtcctcagctacaacccagctataatgggcttagagttccaatcccctttaagtgctttggagaaaaaaataaaggtcggtggtcctgctgagcccattcaaatgcaggaatgactgtgttcaggaatagagaaatggaaacagaaagtgtgggaaagtgctattaaccacttcctggcctgagactcggcaagaggacagaggatagggcggggttatgccaagcaagtgctggagcccagctttctggggccagccttctttctgtaagcaggaagcagggtcccttcaaggccctggggaacctccttgatccagtgcgagcttttgcgattcagtgttgggcgctcactgggtcccaacttgggcctttcccctagggctcaatttcaggaactgaaaattgggttagctatatataagctgcaacttcactttcctccatcacttgttagttgtatgactttagcatctgagtgctccatttccacatcttgggaatgggcctcataatagtatgtgcctcactgggttgttgctatcaggattaaatgagtgcaatttttaagtttgtaactttaaggaaacagtgcaggtttagggagggaagtgctaactctattctgaggactcttgaagaaagatcttaagacatccacttactaggccaggcgcggtggctcacgcctgtaatcccaggattatgggaggccgaggtgggtggatcacgaggtcaggagatcgaggtcatcctggctaacatggtgaaacccagtctttactaaaaacacaaaaaaattagctgggcgtggtggcacacacctgtagttccagctactcacaaggctgaggcaggagaatcacttgaacctgggaggcagaggttgcagtgagccgaggtcgcacgaccacactccagcctgagcaacagagtgagactccatctaaaaaaaaaacaaaaaaaagacatccagctactcaagaccagttgtccactgctgaacttcttattcatttgtgcacaaatgcttgtgtgatacatactgtataccattttttaaaacaatcaattgagtttgaactctcagctcccatcagagaaaccctcctccagtcattctgaggactcgcttggggcagattgtatttttcacagatggctgcaacaatatctcctttcttgaaaactcttctagaattttgttaccccctggttaagaaagagactatgtaccctgctcttgaaccagggccttggtgactgcttctactaataggatgcaaaggaagtgatcctatatgacttctaaggctaggtcacaaaatgccatgcacttctaagtgagtctttgttcttcaaaaccggcagccaaattatgaagaagctcaagcaacctgtggagcagcctcatggagaggaccaaaggcctccacagctctggctgacctcccagctggcagcaagtgccaacttgctaggtgtgtgagtacaccatcttgaaaatggatccccaacctccaattgaaccacctgacattgcgtagagcagagataagccgttgctgctgagcccaccccaaactgcagatttatgggcaaaataaatgagtgggatggtttgttacataacagtaggaaacagatacccgcactcattctctttaccttcctccaccagagatgtgcaaaagtcttggggccttaacctaggcccagacactaacagggaactggcccccatgttcttgcctacaagttctttgaagtctcctgctcagctgttcatcttccacctttggggtgggggaatcttctgagagcctggcaatcctatagccatacctctctgaggtcttgccacaccaccgtcttccccatctccaagttggccatggatatcttctctcaaggctttctagggtggttcttctcaccccttttcccacctccagaactcctggctccacctctagaatggactagaggtagagtctcactagaagtgtctgcgctttctgcctggcaaaatgcccaaggtgagtcatgacaaagcttgccttctgctggaagagaggggatagggacaatgctgagggagccaacccaatgtgatatttcagtgaatgactctgctatggtttgaatgtattggaaactgaatccccaaattcatatgttgatggtatttgggggtagggcctttgggaggattagataaggtcatcaggatggggccctcatgatgaggactggtagctttataataggatgaagagagacctgcggtggcatgcccttgccctctcaccatgtgatgagtcagtaagaaggctttcaccagatgtagcctctcaaccttggaattcccaggctgcagaactatacaaaataaaattcttttatcgattacccagcctatggtattgtgttatagcaacagaaaatggactaagttagactcagatgcacatctactcaacaactgtcccttaagcttccaggcatgtgctagaagctggggagacaaggccaaatggcaatgtcaccatagacctggacaagagggcacctgtggccacccagagcccacacctgaccttgatcatgctttgggtgtttaaaaacctagactgcctatccagcccaagccagtttttttgttttgttttgttttgttttgttttgttttgttttgttttttgagacagggtcttgctctgttgcccagctggagtgcagtggtgcaatctcagcttaccgcaacctccgcctccctggctcaagcgatcctcccacctcagcctcccgagtagctgggaccacaggcacacgccaccacacccagctaatttttgtagtttttgtagagacagggtttcatcctgttgcccaggctggtcttgagcccctgagctctttaatcctcctgcctcagcctcccaaagggctgggatttcaggtgtgagccactgtgctcagccccccagccagttttaaggtttacaaagctgcctgcccaggtccatcctcctgagggtacatcctgtccctggaatgtgcattcatagagaggtgacgaagaggtggctgtaggcaaggcgtgtgggcaaagtttgggtgtgtgggctggagtatccacatgcctgagtcctaggccacttgtgacacaagacagagatggagtgtgaagagaagtggagtgggtgggctgagggctagggccaggctatcctcccgcactgccatgttcttgcataaaattctaaagagtccaagaatgctaaatttgaacatggtcttcctggtcattagaaagaacatttgtcaaggcaggagaatacacattttatttcacagtcagttaaatgtttagatacaaggtatctggtccttgatttgcactcttaacttgggctctccatgttcgggcaggtcagcataacaggaccagtgcccaggccctgcactcctacagggagacactcttctgtgggactcagacaatgacagggagtatggcagagattctagaagctgcctgaagactgctctcaatgtcaccacagctgcctctatctctaatcaggagtggcagggcagcaagggatagcagatgggactaatatgagagaatgtcttcatggggggaggggacagtgaggggatccagctgttttgccaatggccagttcccatctgtctgctggagccctattaacttcagtagggatggtactaggttcaagaggctgaaggagagaccagagccagcaactgggacatggggttttattgggaaacttacacacagggacggccggtggcagtgggctggacaggagaactgtacagtcccatggcaggctgggcaggagagccacaaccgcttacaaaaagcatgcagtttatacatcactctcacttagcaccctccccctaacaacccccacctgataaccttcatttggccccaaacaaagagctttgaacccctgtacaccctgcattccacaggatgggccggggttcaaatgttcctcacagataaggaatgaatctccaggttggtcattcccggattccttagctcaaaactccaaacacacattggggtgcatctgccatacaggaccattctcagggtatgcttaagtcaagttattgctgtcaggagcatctgccatacaccatcacaaacacccccagctcggagggagcggggtgtggagtagggtggaataggaggaattttatgcccattttgcatgggctgggtagggtagggatctgaaacccagcccaagacagaatggcacagtggttctcaaagtgtggtccccggaccagcatccacatcatctaggagcttgttaggatcttaaccacttgcaggatagagggtgtctctctgcgggtatgacacactgctgggtttaaaggattctccagcctcacttttctgacttggtgtgggaatgctatgaaggagactttttgctgaaaagagaacattttctgagcatgtacggcattcaagcggtgggccaaatactttatgaatgctgtcacatgtaatcttcaacagctaccatcaagatcggtatgattgttatggctcattttattattattccctgtttaagggctcatcccagaggttaagtatcttgccttgtcctgggtttaaaacgcaaccaggaagctacctaggtctgtgtgattctcagaccaccctgacttctttacagtttgctcaacagtggttcatgcttgaatgtgattcagaatcacctggaggccttattaaaaccaattgtcccacagttttccattcagtaagttgggatggggcttcaaaatacgcactcctaacaagttcccagatgatgttgctcctggttcaaggaccacgctgtgagaactacagtgctgggctgggatccagctcccgcccttactccactcgtacaaagcgctcataatcataccctcccacaacggtgtgttgtgagaggacattgtgataatggaagtgaaagagctttgtcagctgcacaggtgaatgcccctggtcattaaccaggtaatctgcctgaggctagtcctctggagcctgggagggcagagggctgggacgcagggtgggcaccgcagccacctagagagctcttgcagcccacctcaattttgggccactttttcttcagggagaaagccagctttgagggcttaggcccacagcccctcctgccactattctcatcaacccacacctcctccctcacctcaggcagctgctgggcactgccccagcactggttgttctgggctacttccccaggggccagtccaggcaagctggggcagctcaagcctgtgactcaggacctgaggctggatcccgctcacgcccgcctccatgagattcagagccctcgacttcccttctctgagccttaaactgcgcattagtaaaataggcgcaacgagagtacccatgagttgtgggaattcaagggctagaactgtattcagcgcttggcatagagcctggcccctggcaaggattcaatcaatggtagtcagtattttcaaaaagttcctgggcccaggccgcctcctgatagaggccccgacttaggacacaaaccgctcccacgccgttccccggcggcacccggatacacccgccctggaatgccagcgtgggggccccagggctacccgcccgagatgagaggggcagggcagggcaggattaggaaggcgctgagcccaggctggtgcggggaggggcgtggcctcaccctactagggccgggggatggggtgggctcgaaggagaaagtgaaggaggcgggggcgctgggagggcccgggaggagaccgggaggacgaggtaggcgggagctgggcgggaccgttaggcagcgccgtgagtggacagggctggagcggggcgggcttaatccccagtgtaacctgggggcggggctgccgggatagaggagagactccgtagcggggcggggcctcagctccagctgggcccgggggcgaggctggttggggtacggccatagtgggcggggcctggccggcgggagcgcaccgccttcccaaagggctcgggggcggggccggcggagggggcgtgtcttctgggggcggggcctgccgagtccgcggcgttccccggctgcagccgggagggggccgaggagtgactgagccccgggctgtgcagtccgacgccgactgaggcacgagcgggtgacgctgggcctgcagcgcggagcagaaagcagaacccgcaggtgagcaagggggcagcgggccggggtagcctgccggacaaccataggcaaagttagttttagcccccgcttctgcggtccggctcggacaactttcctcggaactagtgacaggtcggggcagctggtgggtgaaaaggagctttagccaccagtcctgaacccccagttctcacactcggccgtgcacagctgcgtgatcctgggtccgtccctctacctggctctggacctcccgggttccagcaggaggaagtgaaccaggtgaattccacgctcccgttgccctttctcacttaaaacgccggaaggtgagagctggcaggtgagagcaggctgcaggtcgccacaggtgttcccatcgcgttgccctctgcagtttctctccctgcaaaatgggactgagagaagcgaattgctttaaagagtgcactgtttcctcggttggggctcgaacccaccaaccctggggaagaggaggccaaagcagggaggttccatttcccgcctcacctgcttcccaccaattctaacagttcaactgagccggaccccctaagacttcaagttggaaactcagtggggcttttccaggtgagctggcctgagcaggaggttggaaactggggaacagttcttacactggtgagtggggaagagaagggaaaaccccaccaatccttgggcccagggtcaagcccagggccccaggggcccttgaagcatacccggggttaatttcttggctgacgggttctgttcctggaggtggtgggtgctctgtgctgggccccagtagcggggcagcatagttctgtggtcaaggcttgggctttgggatcaaactgatttggattccattccccctccaaacttcagtttcctcacctgtaaaatggggataatgacaatatccaatagcaggagcaagcactaaatagaataatgtgtatacactacttagcaaggtgccaggaaaccagtgagacctccctctgtgacagctgctttgatgcgggtgggcaggtgatgggcttgcttcctatggggaatgagccttttttttttcttggagagatggggttggctacagcccctcctgaccttgtgaaagccagaaattgccacctgccaccaacatcactctatttgagggatgaggactgtgtcatctggaacaaagagtggctgagttttctgtaatgttgcttgaggttggtaagtgttgagttaaataagtctaaaaatgtttactgagcacctactatatgctagagagagctagaggatacagaggtgaactagccaggcctgagttgctgacaatgagggctcccccatccctaccatgtccctgtagagaggatcagtcacacccagggcttataaccagatgagatttcatgggtctgttctgccctggtggctggaatccagctataccattgcacacttggcttgggatgggggcgaggggcaatgtgggcacccgatatctaagcagggttggacactgaaggacgctgaaggtgctgcattatattggctccctgcatcttctgggagataagctgtacagtatggaacaaactggaaagtgctgtgggacagagacggactggcggctgcgctgtgtgcaggagactgtgtgtgtatgtagggcagggggaggtgttcagaagagtgagacacttgagaagccagggcagggggtgggggtaaggaggcttcctggagggggtgagacttgaataggactttctctctgggctcctggtcctggtttggcttggatcaacatgggaccacagtctcttcaagcactgaagtggcataaattggagtttggtatggtggggagggagagggtctggtaggtggtgcctgaggtggggaggaggagacgttcatttcaacagagcctacctagtgagccttaatggaaagccctccccaccaccacccccacttcctgctcgatgaatgacaagcgaccacataaggcctgcaccctcaggttgcttaccatccgggaaggggcttacacaagaataccagggactctgatggaagataaatgaaaaaaggattagagggatcttcagggccttacagactgggaagatttcggcagccagaatgaagatagtgtcttgaggagaggaaaatgcctaggcagaggcagggaggtcaacctgtcctgagaattctcgagaaacctctaggttgctcattctggctgaagtttgggaacgtgtggggatatgcagtgggaatagtaggtgggatcagcttacggagggccttgaatgacaggataagaactttggatctgatttgcagaaagtgggagccactgaaggtttctgaggagaggagtgacacaacagagcagcactttaggaaagtcagtctgtaccagatgtgctggggtggaggatccagcggtcaagggataatgaaccaatggctgcagtgactgggaagaaggggtctgggtggctttggggatgtctgcaactgggagtgaaggaagagacaccagccacagggagagcaaaggcaccattggaggggtgggaggggactgttccagcacatttgcacttctttctcctccctatcctgtctggtacatagcagggtctcaggaaggtggctggattgggtgagtggcggggttgctgggagggtgatgaatgctacagaggggtttgcccatgaaggggaggcatctgggccgaaaggtgggagcctgtgccagccagcagtaagtttgggggtcgggggcgggatggttagaagaagtgcctgctgatccctccctcccatcccagcccagggaggataggggtgagaggtcagccatgtgctatctctggcagtgggtgagcagtcagggcacaagtttcccacagtagggggactggggcaggattttggcttccctgggctcctctgaagtttccgctatgtgggggcggccccctctgtcttgaggcctcacgctttagagccacagcctggaagctcccaccggccatccccttccaccctggggacccaaacctgttcccctaaggaccagacagtcctccctcaacccatggctgagcagccccaagttctgagtgttgtttcagattcggagcatctggggccagctggcacccctgattctggcttgaccttggccttggccttctgctccaaaccgttatacccacttcctctgccccatgggaagctcacagggggcggttatgacttaatcaagaacatcaaacggccaggagctggctctgtgagaggtgggaagggagggaagagcctggactgtttggcctgggcccctctgtgggacaggacccgtttaatctcagcaggaactgccctacccacccgcttcccctccactaagccggggtctgaggagctgggaggggaagcccagaggtaaacatggagtgagtggtgtgggatgtgttgctcccctcgcccctgatgctgccctaagaagaggcagacaaccacagacccggggcctctgcaacaggcccagctggtgtctctcggaggctggctggttcctgactcacccccgggcttccccttccactgtggttttcctgtcagcagctgattcactgtgctgacatggacaggcagctgatggaggaaagagacctgtgttctggtccttggagttggctgctgctctgctgtgtgtatgttgtgtgaccttagataagttccttctctctgggattccttccctgacttgctgatgccccattctttccttggctctcggggagttctgggacctgggatctatcctttgcaaagtagggcatgtctgtgaacacccacccatactcaggcatgcgcacacacacaaatacaaccccaacacagaggagctgggcagctcccctcaaagagcacttgatcctacctccctatttttaccttgtttcccccacctgaagcacctttatcttctttctgcctgttaacagattagggagatgatggtacagcatggcggtaaagcactggactttagagttgagatctcggccctgccaatttctggctacgtgactctttctgagcctcagtttttgaacctgcaaatggggataataatggtcatgacttcataggtcatgaggagaagacaaaaaagtgcacatgaaatgcttagtattgttatacctagcacatagtaaatgctcaataaaggagagccattgttgtttgctgtatctggttggtctttcaaggctggtgccaggctccttctcaggcccccagggacactcccagaacaccttccttctgcacagggcctctgtgcctctccaatatgtgtgtgccccaagacgccagtcatgtctggctatgtggggctctctggctcttcctgggggtggctgggtctcctcactgtgacgctcagcttcctgaggggcagtaggtctgaacatctctggctgcctttcccaagcccctcattgcccttcaccttctcctctgtgcttggctgcctttcccaagcccctcattgcccttcaccttctcctctgtgcttgtctacactgtgtaccctcctctttgatcctgccactttgtggtgtatgatgtgtttccatgagctctcctgggcaggcactgccctgtcctgtctgtatctctgattcctggcatacagcaggcacttggggatcgatgactgaatgaataggttagtggttctcttgggtgaggccgggggtatcagcagtacctagcttggtaccacataccaggtgactccttggcaaagtggagccgggaagcaggacctggatgccactgcctggtgcttcaggcctgtgggccgcacttctgcaacctggatccagggagatgggaatgcaccgtctgtcctggaattgctttcagcagagcttctgcttctcttccgatgcctggcctttattaccctcctgagaggggaacagcatgacttccttcagtcctaacccaggaaggggccactctggcctttagtgaactctgactcagccagaaagagcatcttggagtcaacaattgtttgtggaaggtgctgctatcctgtggggactcaagctggggcctggagaaatgggacggtggcctccaggaagcccatcctggacatcatccatgcagacccccaggtgggcagctctgggaagccccactctcccctctgacctcctaccctgcagcagaagcttttgcctcttctccgccgccccaccccgcaacttgactttccctgctgtgtggaagggtgatctggtgtgggagttgttcagagttctgggccttggctctcagtgtcaatgtggagaagtgaacaatgccctggtagttgggcattaggaagcccgggttcaaatcctggctctgccatggagctacagcatgaccttggccagagaggtgacttctaggcaggttttcttccttttaggcagcaagtgttccagaagccttcctgagtcccagctgggcttgggcctgggggagtggggaagaaagcctgggcaagatcacagactctggaatcaaattgcctaaggatgattcccgcctctgctacttaccagctaggcgtgactttgtgtcttaccgctctgtgcatcagtttcagcatctataaaatggagacaataatagtactcatctcatagggttgtttgagaatgatatatgagctaatgcatatgaagcatttaagacagcgcctggcacatagttagtgctatatatgttcctgctgcttttggtagtgttttatttttatttttatttttttttgagacagagtctcactgtattgctgaggctggagtgcagtggtgcaatcttggctcactgcaacctccacctcccgggttcaagtgattctcgtgtctcagcctcctgagtagctggaatttcaggcatgcaccaccacaccaggctaatttttgtatttttagtagagataggatttcaccatattgatcaggctgctctcaaactcctggcctcaagtgatcctccagccttggcctcccaaagggattacaggcatgatctactgtgctcggtgtttttggtagtgctgttaataggaagcaggatgtaagtctttgaagagcttgagtctggagatcaggggacctgggctccgttcccagctcatcttttacttgctgtgttatcttgggtaagttatagcccttcttgggctacaaaactatattatcttgcatttgctgcacttggcttttgtaagtgaggcacatgtgatgccacagtggacggctgcagggttttattcaggggaaggactcctgggggcctggcttattctcctgcagcctaggaaggaaggaaggctgtagtgtgggcaggtcccagctgctgccctaaagcattgcagagactgaatggcagagctgctcccctacaactctactctatcaggccaaaatacaggcaactacatgtaacgtacccgttacgaaatacaattatatagattagattacagacctttattatctttttactttcccctattttccaaatctacagtgagcccatatttttttatgctcaagaaaaaacccattcatacaatgaagctataaaaaacataccacacatatttgaacaaaaatgtattatatgaacttgggatcatattgaagttctttttgtgaataaatcatatttttttcgaaggagggatgggatgttggtttgaagtgaatatcaatttgacaagcctcagaagacttggagggagtgcctatggtaggagcgtccattgtccgcagccgcccaggctgggagacaagagttagatatgaataggagtgtaatccgccttcccatgcggtgggcacaccctgagcgttgggtggtgtgtagaaagcttttgaacagtagttgagatcaagttccttaatgaccattctgagcctcagtttcctcatctgtgaaatagggatgggctgctgtgagggttaaatgagctaaacacatattgaatatggagctctaaatggaagccggtggaagaaggtggctttacatctggggtccagagggcttgctgactggcctgtcctggacctggcagagttacccgtcccgccacaggacgtgctggacaggaggcagcctcctgcaggaccaggtagcaggagcagagaacagcccagacagaactctccctgcgggcaatttggctctgcgaggggcggggccccactgagtctgccctatgtgtctctaagacgaaccaatcataagcctcccagggcgtggcgtgaagcggggatttggtaggggagcgcagagcgaggcctgaggtgtttccctggcagaggtccctccactgggaaacaaacggagaggggagtatgtgttcccacgtgtacacataaaccgttttgaatgatacctggtatgacgtaagcactcaataaatgtttgttgttgctgataataacaattggtaaattatactagtacagttggaaaaccacctcccactcactgtcttaaaaggtggaatataagaatgcttttgcagtgggacctatgagacatcatcgtatatagaggaaatagaaacttggcaggggaggtttgatttatctgaggtcatggagcaagtgggtgtctaggccttgagtcacctttggacatgtagatagcccacctccctgacccctggcctttctgaacacacagcagtggagtaactgaggcagggaggatgtgtcctctactctgaactagtcacttattttccatccgaaagcccctcttatctgctttctctgccccacaccctctcctggcatggttgagcaagtctccttgtttgccaggagacggtatggcatggcactgtggttctcaaaatgtgtgcctatcaggaatccctaaccatccctgcaagttgcagtcagggaaacactggggctgtgcctacagcttggggttctagcttctcaggcattgatgtcagccaggcctagctatgggcacagtgtctgttcacctctgggcaagtttcttggcctctcagagtcttggtttttatgaggattaaatgagataatgctggtaaaatgcttcgtggcaggcccagggaagagtgcaccctcaatgaagccagaggttaagggtggtgatgatgagcaaaggctgctcctgtcattacttctggggaaatgatagggagtcttcctgtccgaaggctgaggtccctgatctggagtgagggagctttccggggttgcttgaagctctgctggggggtcagcagaagacttagattctctgtagtcttggtccccagactatctgaacccagccttgagctgggtgctcttggcatagagttgagggcaaagttgagggcttacgtctagagtcacaggatcttggtgttgtgagaagctctgtggtccatccagtcaacctacctgcccagtctgatcccatggaccacatccagcctttgctcgcacacctcaaggcttggaaagctcatgattttttatttctggaaagaactgactcttagaaaataggggatagaatctgagcaaacccacccacccttggcttccccattttgatcctgatcttgcttgttggaattacacacaatgtggaaacaccctggtgggaccaaatcttgtagcagaagaccccaggccagcgattctgacataggaaggagatttttcttttaaaaactttatctaaaccaaatggctaccccaaaaaaccccccaaactttctgattattgaagaaagagggttttttttgtgtgtgtggaaaaattcaggcggtaaagaacagacctgcaggaggaaataactgctcagagataactgccgtgagcagtttggtgttttggccttaaagacacacacatacaagattgggattgtaccacacaaaccacttcctgcactgccacttttgactgagtgctgtatagggagggttttcccatgtgattgagcattcttctccagcaagtttcccagctctgtagtattgcaccataggaatcttctgtgacctggttaagcattccccagccattgcacatttaggccctttgaatttttcattagtatccacattgctataatgatcgccttgtccctatgtatattttgtactcaactctaatgagctccatggaatgaatttctagaagtggctttccagctcagatggtttttaaactcaaggtcagaggaccagaatctcccaccataaccagtctcccagtttcgcttcagccctactggtgggggagcgttctgtctgtccctggtgctagttggcctacccacaggaggaggaggagcaggcttttagggtatgtgtatctgtgaaagagaaggagatggagaaaggcagatagatataggggagtgttttctcttcaattacagtctgattttgaccctctcctctctgggagcctgtggtgtcattaactaatcatgggctctctttactatttaatgacctctccccacagtgactccttcctccccaacagtctcctggaaaggaggaggtgggaagatgagtcagtgggggaaagtttctccagagtaggtggtgggtgttgcagtggttctcaaactctgacatgcatcagtcccttggatggcttatgaaagcacagattgcttggccccacccccaggtttctgattctgtgggtctggggtactgcctgagaatgtgcattgctaacacgttcccaggggacgctgcatctgctggccctggaccacactttgggtaccagtaaagtagtgggatggggcagggtggggttctgtggtgagtttcagctcctggtgttgctgacagtaggaaccttgtcctgtttaataaaggctcatcttgtgaggcctgaactcaccttcccctcctacccccacctcaccaccccttctcccatgtgtcctttgtatatattgggaactttctgtgcaggaggacaagaggattatcagcatccccgttttacggaaaagaaaattgagtctctgacaagtgacatgctgtgtctaaggatgttgaaagtaggagggctagtactggaaccctggcgctgtcacgttccccaccttgacttctccagtgcaggtctggtgcggaagcagagatgccttccctgaacactgcaccggccccaagtgagaggcctggggaggcagattcctccacaccatctctgcgctaggatcttgctccacttcttatcccctgactgacacttcagtaacgtgatcttcttccaaggtctagtgttctccagcagtttatgttcccagttattgttctgggcaggttttctaggaagccaggaactttctcctgtcaagcctgggcttcgtctggcaggcacaacagagggaaaagagaaaagcctcagttgttgagcatctaatgtgtaccaggccctgtcctggacactttgcagccataatgtcaggtcagccaccccaggtaggggttaacatcaggtcccattgtacagatgaggaaactgagggtccaggaggtaaaacaacttacccaagttcacagaactgaaaggggcagagctgggcttttgatttcaaactcaaggctggggtctggtctgggatggcagcaggtcctgttctggagggagccgggatgtggagtaagcagcctctgccccacccgccatccacgcagagacggtcagcccaagggtcaaagctctcttgggattcagggtcttgcagtgggagggcactggctggtcaccgggagacccctttcaaatcctgctctgctgctgcctggctgtgtggcctgggggcaagtcactgcccagtttgggacatctgagtcctcctttctcataatgatcccttatgctttacagctcttggcagtggacattttctcatgtacttattctccgtccctcaagccttccagcaccctgtgaaatagggcgggcattattactaagcccattttcacagaggatgaggatgacagggcagggagttgcccaggatcccgtgggcagttgagggatggtacaagagctaagactggaacctgggttgtctttgctgcccatcttgagcccagcccctaagacgggagaactctttctctctattctcagccttaggatgaaggatcccagagctcttagctgggctggtgggtcctgggtacaaggggcccaggatcccaggaagggctggcctgggatcttcgctgttggccaagaacccatggggaggcaagatagggtagtccaggctgtctctgtttctgactcctgcccaggccttgcacgtgaggtccttggtgctgtggggaaggaggggttcagcccaggttttcctcccagctcggctgcttgcttctcctgggaactgtgcttgtcctctaaaatgtatcatgcagaattttccagactctcacacatgggtgcctgggccctgcagtttcacctgaatgccatcacttcctcctgtcttcctcattcttctacacctggctccagccaccttcttccctcagggaagacttgctcctctggccaagccgactcaactctctcgggttctgtgcagtgggtgaactggctgaccgggttggttaactccccagtgaggcatgagagcagggcctgtggctggtgtgggtccaagcccctgcagggtctggcagggcatgcagctgagtctatgcatgctagggaaaggttagcctcagacctgtaactctcaggcttgtgactttcagcaagtcacttatcttctctgaaccctggtttccttcgtcgaaaagtaaggaagctactttcctcgttgatagcttctgatacttttaggagataaagtgcaaaacatctagcactggtgcctgggggttcatggtactcaggaaatgccagtccctcatcttccctgcagtgggctcaggctatgttctgcctccacctaccccaacccgcttgagtagggcgccgggttgggccttggcctaaggcctgaactataggtagctctaggtagggggtgtcctcggcggataatgggccaaggactgggcacagggacagaatcagctgatttaatcagactctgccagttccaacttgtgaccctccctgggcacgttactaacccccctgagcctcaatttccagatctgtagaaagagatactctgtctcctgtgttctcaggatcacacatgatcggcaaacaggagaccaggggatggggcccaggcgacctgagggcggcctcccaggaggcttgggtcaggccagtggctgcttatttacatatcaattttcctactggggaacaaatagtccccttttcctctggacacccagaggctctccaggcccatatctcttagtgcagtgcctggtttgctgggtcgcccagggaaggaggcagcctctctctgagctcctatattcctgtgggaagagagccagggagccagcccaggtgtgaggccctgcctggttctgtctgagaccacgatggtgttgccacatgtcccatgcctggcccctggggacagaccccttcctatagcgcctagcacctttccttctcacctctgtctgtacatctatacaccccccttccagctccatgtggcccagggccttctcacggcaataatgatcaccacacttccctttattgtgtgttttgctactcaaaccacacacctccctctaggacaggaatgaaccgttactactcagagaggggaactcgcccaaggcccacagctggactcactatcctctctgcctgccccagctctcagtggatgtcaaattcttggctaaatccatcagcaatggaaagttggttggccctgggaagaggagaggccggcggatggctaggtccaggactggaccaggggggatggggtcccagatttccaccctgcattaggagctggcatagggactgtccccactgcacagataggtaagctgaggtttgggaaaggggagtgattgatcacagcctagagctggctgggctcattccccttctctcttcctccccatggccctgagttgctctagtggaggggattggatggggctgtttgggacccagatgttcattttgtcttagccgctgccagctgaggtcaggtcccttctgtctgcctcagcttccttagggggctcagaatggctggaccagagcactgcagtgccctttctcatcataaagacctggccagcagcctgctcaggaatcacatttggtggggtaacaggctttttcccagggcacagtgccgccactcctagaatatgggggaggccaaggctgagaaaaatgtgctggggaagggtcattgttaatgggaggtagagagggggcagggtgggtgaggctagagggtgggcccattccttcggaggtcacaggggaggcaggacatgcagggcaacctctggggtggccccagagcaggagctgggaagctggcctggctccaggggtgggtgtgggatcctcctgggtcagcagggcctgcacttccaggccggcctcaccgcaggctcccctagacttcctggtgagacctgacagggcctcagggtctgcaggttggtgctccaggggaccagaggctcccttcacccttgagtctatctgtgtcttagtctctctgtcccggcctctctcactccccgctctgtaccttgctctgcccaagcccctcagcaatctcagaggagaggcccagggagccctggggagggagccctgacaggcccggtttccttttgttaccagtgttcctgccagagctgccaagtgtctgggctggttaaatggccgcttccctgcctgggaaccaggggccctctgtgggaagcacagcccctttattcccagcttggcaggcccagatctccgcagtagaccatggaagtgggtctctcagggccaccccttgcaggagctgggctcccgtcatggagagggctcagtacgctggagactggggcctgtgggctgggtgaggttgcctcagacactctgggtattccaaggctctcaggatgttaaagggagagacttggatgatcacagaaacagggagtgacaaggaagaggggatggctccagggagccacagacagagatagggaccctcacagaagggaagagacaggtgagggagaagaacttcagagagggctgaggccccacagagccctgccctgccctctccttctcacctgggctgagctgccttcagctagctctcagccaagaagactccccacccccaagttcttgtagttagagacctgcttctaccctccacaccggcccatctctctgtgttttcacccaaggatctatggagacagagtccctgtacctatgtgcatcactttgccttcactctgtctcacttactcctctctctgcccatcaaatactcctaaaggcctgcagagtactgagaactatagccttgggaggcaggaaggattagcccattggacagatgaaggaactgaggctcggaaaagttaaatgacagttaggaaagggtagacaggccaggcgcggtggctcacgccgtaatcccagcactttgggaggctgagatgggtggatcacttgagatcaggctggtctatgtagtgaaaccccgtctctattaaaaatacaaaaattagccagacgtggtggtgtgtgcctgtaatcctggctacatgggaggctgaggcaggagagtctcttgaaccccggaggcagaggttgcagtgagccaagatcatgccactgcactccagcctgggtgacagagtgagactctgtctcaataaaaagaaaagaaacagtaaacagaaccagggtttgaatctatgtctgtctgattgtctatcctaaattctcgtgatgagataattagggctgccatatggtgttgcctgaaagtctgtgctggagaatgttttggaaaggctgcctcgaggatgtggcatttcagcagccctgtgtctaccttcctgagctcagtgcctggggaggggaaggcatgatgtgacaaaaggtttgcctgttgccatgtggggtccctgattagagtccccctccctctctctaatcaccctactcagggcccacacccttttgttagccacctactccagctggctaggctctgggatcagtgtgcaagctggtcactggtgcctaatgtcaccccagagtgtcttcagttggttgggtttggaagctgggccctaaaacccaattaatctaggctgggccttggtggggtaattttcattacctgtcatttacaactttgtttctgcaggcagcatggtgtgacagtaaagctcaggggctctgggagggtcagatgttggggttcaactctctgcccaaccagcaaggtgaccttgggcaaggcccttgaccaccctgagtctcagtttctgcagttgtacaatggggtgatgagcagtggcttatctcataggatcattgcagggataaactgagccacgtgaaggacttggcacaatgtctagctagtaatcatgcaaacatgtttgcgtttgtcattgttaaacacttgagtctgtgttctagagagccccttttgtccttcagagggagatgcagtcagcaggctgctttgtataattgctcatgttcatgtctgagcctctccagactgggtgctccctgagggcagggatgggttggagtcatctgtttcctgtttcactccagctccgggccaacctggagtggggattcggtgaactgcagtggatggtggctcaggacagaaactgagcgcagaagggccacttgggaggcccctgggagggcagcccctcaggccctctggatcatgagctgtgtattctaagaggagagggtgcggttccctatgaggtcccctctgagggctagacctggttccatgtgctgctgttccatctcggccctctgtgtccaccttcttcatggctggctggtggagggagagaattctgaaatgctgtgtgtttgctaaacctgcaggtgcctggccccacccccggatgctctgatttcacagtcctgggaccaaggctttgcccctttaacacctggctgcagtgaccaccctctctgccttgagattgccttggtggtgggaagtaatggcacaaagtcagtaggatattgaactccaaagtcagagagtcttgagggcagagctcagctgcaccactgtcccccctgtgtgaccagggccagtgccgccaccctcctgaatcccagtgatccttcctggggtttggggctgaatgagataagatcagtgaagcaacactcccattgtggatgctctcatgaatgttccttttgctcctaggtctttcctctgcccaacctcatttcaagttcttgggtggtggtgacctccctggggcagtctgcaggaaccctgtgtccatcccatgcctcaagggacaatctttctgcaacttccttgctctgggacctaacaggacctattcccagaatcctctgcctctgtcatgcttacagccttgggtttggcacgctgattctggtttcctcttggagggtcctagatagtctgttttacagatgagaacactgaggctcaatgcaggtaggcagcttgccagaggtcatgtggatactgagaaatgagatttggaatttagatctctctcagggcccgtactatcatctgcttcattattctatctccagttgtggcactgggagagggcctcaaaaggtggctgacccctgagaccccacctgggaatcctgttttcagggcctctggaatctggggcttcttgcaacctctctttagctcctaaatatccctctaggttagagctttccgatcaatgagctgttgagatggttatctctggagcccttgagaacagagccctaggctagtaacctcaagccagatgtagttctatctgtccatcccagtgtgctgaacaaataggtatacttctcaacgtgtatcatgatgccaaacaggctgggaaacactgactgccctacccaatcccctccctatcccccaacatacacaatgaacttgtgcattccccagaaggggtgggggtaggggttcattttcttctctgggcatcagtcttcatctgagaagtgtgggctgagctagtgatgtcaaaggccattccggcactgtgaatctgagtgtgagtcttggcacctagcattgggagggagtgggggctgtctggggcccaagcagctggctaagaagccaaaaacagtcaagcaagggagctgtggaaagcaagaggtcagaggctatggctcagcctcagcttgattctttggctgcatggggtccaggcaggaatgctggagggctccaggtatctgctggttcccactctgcaccctcctgtcagagaagcccctttctttatctaaaggccctccagtctcattgctagggtttcaaagcaaaacctcctgagaagggccacatctgtcagtctcatcagccaaactgaaggaatgtcccagtcaggattaggtggagctgctcttttccttcctgaaaggaagctgagagtcaggcctcagggatctggggtagggtcaggggatcaggcagcaggcggcagaggtgtggaagggtgggacggtgggctgcagcatttaccttgttcatttgggcagcaggtgaagatgaaagagctttcagctctctaaaatcagatctgaattttaatcatagcttagccacttgtgtggccttaggcaagtcactgaacctctgagtctcagtccctctatctgttaaatggggataataatctctcaataatctctcgtttaataataatccagggtgttatggagattgcatgggatacagtgggtaatggcataatattcagggatggctgctggcctgtgttgctcttggacccctggcctcctttccccaagtgtcagctgtcaatcccagctctctcaggagagagggagcctgtctcactggttcatgggatcctgtgacaggggactcttccttaatctctaagacaaacagggaggcactttgggctctgaaatcctgtgattcctgggaaggtctgatttggatgtgtttcttcccaccttggtggtggtggtagtggcgggatctcctcactttgtggtgaggagctgacagtgaccccaaagctccttccatgtcattttctgctcctccaacaatcccatgagatggggatcccaccagcatcttgctgttagaggtgggaatgttggggctcagaggggtttagttactcacttgctcaagctcacacagctaggaggaagcagagctgggactgaagcctaggattctgtttttgtttttgttttgagacagagttttgttcttgttgcctaggctggagtgcagtggcaggatctcagctcactgcaacctctgcttcccgggttcaagcagttctcctgccttagcctcctgggtagctgagattacaggcacccgccaccatgcccagctaattttttgcatttttagcagagatggagtttcaccatattggccaggctggtctctaactcctgacctcaggtgatctgcccgcctcggcctcccaaagtgctgggattacaggtgtgagccactgtgcctgggccaaaccctaggtcttaaaggaaacctgaggccctcgtcctgcttatgctcactcttctcctgtcacccagagtagcagctatttttttttttctggtgggtgggggttaatatcaacaataagagtaagaccagagattgaaaaataagatagtgagaggtcaaaaagccaggccctggtcctggtgtcagcagggatttcaggaaacacatcacctgtcaaacatgaaaacaaacacagccgtctgtgcccagcctcttcccgtgggtgatcaggacaaagtccagaggaccagagagctggtggccaagaaccagcttgcaggtggagtgcctgcagatgggctggcatccagggcacaatagcccggccaggctttctcactccactttctgcccgactgggcagaccgagctcccacgggatcggatgcccaactcaccaaactggctggacctctgagtctcaagcagttcccagtggcacagcctggaggctagaggcagaggctcctccttccttaggcagcccagcctggtcctacttctcccccagccccttacccaggagcagcagtggtcatcttctggcacggagcctctccaggatgggcacatggctagagactggatcaggcctcagagggcttcagactgttggtcaggaaagcaacaacttttccagatcatcatcatcatcatcatagttggtaacatttatctgacatttactgggtgccaggaactttatagatacaaactctttaagcctgaccacaacccattattaagttcattttacaggtgggaaagctgaggcacagtggtaaggtgatcacccaaggctacactgctggcaaggtgtggcagatgtggcatctttatgcaggaagagtgggaggagagggccaggcaccagcatagattgtgccctactatgcactagcctgatggcgattcatcttcatgcctgcggtaggtgggcggggttggcatccccatctgtggataagggagcagctctgcagtgtttcccaaggtcatgtggcagatacccggcagagccaggggtgggagccaagggccggctctgtgattctgagtccagtacttcttatccctcccatgtgggagccccagtgtgcagggacagggccacaggtagagaaaggagctccagactgggaatcttaagttctccacttcatgcttagcccaagctgcctgtgccacctgccatctcttgctctctctgcctcctctgaaaaacgcagtgatctcaaagttcttctcatgcacagtgatattgctctggggtaacagactggagtagagggagccttgaggcagtccaggttgaaagatggtgcagggagcttcatgtgacactttttcggatgccagagtgccaggcagattctccctggccaggcgctgctgtaccagaaaccccaggcctgcctgcaccccactgaggagcagaggggctggcctgtgtgagggatggagccatggcagtgggtctcaatacactggaaccccctggagaactgaagaaaccctgatgcccaggctgcaccccagaacaactcatcagggtctctggcagtgggggccgggcatcaacaactttcagaactcctagggtaattcctgtgtgcagccaaggctggggaccaccactctagggcatttaggagatggcagaaaaaaccttggccctcaggtaggctttccagggcctgtgacctcctgaaactggaaggaagtatgtgcctgcccgtctgtgtgcatctttctagggagagttcacagcttctgtcagcttttctgacccaaaggagattaaaatccttacttgaacccaggcatttgagacaagtctgggcaataaagtgagaccccatttctacaaaataatcagccaggcatcgtggcgtgtacctgtggtcccaactctatgggaggctgaggcaggaggatcacttaagcccaggaggttgaggctgcagtgagctgtgtttacaccattgcactccagccttggtgacagagcagagtgaggtcctgtctcaacaaatatatacattttaaaaaatcctgtcttaggaggaagcaacccatctctaccccaatccagcgatatcattctaaggatcagaaacctccagctgcaggatcaattctggtctaagaaatctttcctgatctctctagacctcccttttctctcctgcttcctaaaaacatacattgagagcttcttatacacaaggcactgttctaggctctgggaaacagggtgagtggcacaggtgcagcccctccccttgaggagcccatattctagtggcggatgcagatacactagtgaacaaataggctaactgcagtgagggtgccgtgtaacaacccagatgtcaactcgggctgcttctttgagtctcctggggagcccagccctacccctagagatcctgatgacttggttggggcagggggcctgggcatggcctatgttgattgtaatgaggagctggagttgaggccttctgaatagattgggtgtttagggagggcctttgggaggagggatgtcagccttctgagccaaggcttgtgggaaaatacgggaaaagagtaattctggcagagaaacccttttgcaaaggccctcaggtaggtataaggacctggggcctgatataccaggacaacaggaaagaggctacatgagcctgtggggggaagaggacagaggaatggcaaccctggcggggccccgccggccacacggggagcctggatttaaagtgagtatgtcttcagccacattgcctttggagagtcacagacaggagtgacgagatctgggtcgtgtttttcagagtcctccctgctgctgtgtggacgacacgtgggcacaggcagaagtgggccctgtgaccagctgcactggtttcgtggaaggtaagtcctgggctgagaggagtggtgggttggaggggacacacttgggctgtgaggcgaggaaggtggagaccgagcatggccctcaggtgttcagtctgagccaccaggtgggtggagggaccacttcttccccttctctggctcctacagcatttagagtcctggagtgctggtccctggggaggctcggcagcaggtcctggcattcagagctggcccagggttgagcacctgacacacccccaacctgccctgcgggcaaggacagaagaggcctgagaaccgtctcttcggactcaggggcagtggaactcagactgccttcaggtggccgagaacttgaaagccctggtgttctttgtggcagtccctccatctgtctgtccatccatccatccacctacctacccctccatccctgcatccacccagtctttcatgcagcaatatttgttgggagtctgccttgttctcgtaaataacagtcttcccgtcaaggtatcacagtcctcaggggaaagggacaggtaagtagaaagtgactgcacagcatgcgttataggaactgccgtctatccacagcagaccatgtggcaggcattttgccctaatttaatgtctggacaaatctgcaaagtaggattttggggttttttttttgttttttgttttttgttttttttaggtggagtctcactctgtcacccaggctggagtgcagaggtgcgatcttggctcactgccacctccacctcctgggttcaagcaattcctcttcctcagcctcccaagtagccgggactgcaggcacccgccaccatgcccagctaagttttgtatttttaatagagatggggtttcaccatgttggccaggctggtctcgaactcctgacctcgtgatccgcccgcctcgacctcccaaagtgctggggttacaggcttgagccaccgtacccagcctgcaaaataagttttatctttgtcatttcaccaatgagtaaagtgaggctcagagaggttaagtcacttgtccaaggtcacacagctaggaggcattagaactgcattcaaatccaaggcagcctgatgccagagcctgttcagggagctgctctagtctccagtgccactggaaggaaggagagagggagtgcccctaaccaacatgtgtcttgggggtcagagggtggcagtggtagtgatgaaaaagctggctggagtaggaagtttcctggaggtggtgattttggaggtgagtgttaaatgataagtagaagttggcaaaatattaatataataattttattatacaaactgatttggcataaaatgatatatttcgtcaattaaaattgtagttgctcagaaatggtcaatttacctggtgtcaagtataacataagatcagcacctcaccaggaacggtggctcacgcctataatcccagcactttgggaggcctaggcaggtgtatcacctgaggttaagagttcaagaccagcctggccaacacggcaaaaccctgtctctattaatacacaaaagttagccgggcatgatggcacatgcctgtaatcccagctactctggaggctgaagcaggagaatcacttgaccctaggagacggaggttgccatgagccaagattgtgccactgcactccagcctgggtgacagagcaagagcaagagtgcctcaaaacaaccaccaccaccataacaaagatcagtacctccatcctgctgctcacagctctctgtgactgttctggaagtttcccattaagatgtgcttgcatctcattcccttgaattgtcagtgtttttaacacaggaaagcttgggcagactctccaatgtttaccaaaagtatacacaagaaagcataacattggaggacattcttttggcttaagatcatctgtaaattaaatcctcatcccttgctgcttctgcaagcactgagccaactgatgatgatgatacagacaccagccccagctccgggtcattgagtcctgactgtaccaggcgctgacctcactccctctttaggacgggagtccagttgggagttccactccccaaggagatgaatgaggcccaggaagtccctcctctgtggccacacattggcaaagccaggatttgaacccttgttcagggatcctgtgtcttctctctctaagtcacaatcaattcctgccacccagctggctgttttctttctccaaagttcccgtgctaagggtagtcgtgacccttgctgcctcttcgttttgttttttttgagacggggtctcgctctgtcgcccaggctggagtgcagtggcgcgatctcggctcactgcaagttccacctcctgggtttacaccattctcctgcctcagcctcccaagtagctgggactacaggcgcccgccaccacgcctggctaattttttgtatttttagtagagacagggtttcaccgtattagtcaggatggtctcgatctcctcacctcgtgatctgcctgcctcagcctcccaaagtgctgggattacaggtgtgagccaccgcgcctggcgacccttgctgcctcttacagacacttgtgggtgcgccatttgatcctctacaccaggggccagcaggctttttctgtaaagggccagatagaccagtaggcatggctgtgtgcagaaatttagattccatgtaattttcatgcattaaagaatctttttatttttcttttaactatttaaaaatatgaaatctgggccgggcacagtggctcacgtctgtaatcccagcactttaggaggccgaggcaggtggatcacgaggtcaggagatcgagaccatcctggctaacacagtgaaacccgtctctactaaaaatacaaaaacaaaattattcaggcatggtggcgggcgcctgtagtcccagctacttgggaggctgaggcaggagaatggcgtgaacccaggaggcggagcttgcagtgagccaagattgtgcctctgccctccagcctgggcaacagagggagattctgtctcaaaaaaaaaaaaaaaaaaaagatgaaatctgttcttagctcagaagctgtataaaaaacaggcagggggctggatttggtctgcaggctgcagtttaccaaccctggttccacaccaacccttatttctgtctcatggatggcagactgaggctcagctctcagtatgggagggcagagccgggcataacccctggcactctgaattcaacctcgggggctccttggagcttggtggtggttgtggattccttgaagttgatgccacagcccatcgtgggtgacctgggtgtgtccccgcctcaggctgagctgacttccttgcctgtgtgggattgcccatctcccgctgagtgtggagaatgttcttcaccctctgctccctgtcagtttgaggcagaagcatctgcacttgcagggcaggaagactttgtcttctggatcttggccagtgtgcctgggagctgcccatcccaggttccagttatcagcaccttctcctccctcgggtgatgtccagatacctctgggtctgtcccacttgactgggctgcctggctctcatttcagcctctggacccacccagctgcctcctgtgtgggatggagcccatgggtggtgtaaggggccaggcagcctgggccctgtccttgccagtcctcctacttgagaccttgggcaggctccttctcccctctgtgcctctgtttgcatgtagagggctgaagagcttagcccagtgcctgatacaatctgtgtgcgtgaccaagggaccagccaagcttgcccagggtctggaatatcatgggaataccagcccagccacgtctgccttggtgacaaggtttcccagcctcctccttgccctctgagcagagctcctctgagcagtcattttgtcctcacacctaactggacaaaggaaacccagccgtccccaaagatccctttataatcctggctactgtccaggagggaccacttcacagaagaaagatcttggggtctgaaaaccactgccacttatgacctgtgtgacttgggcaagttactgaacctgtctgagcctctggtctgccagggataggaatactcacttcctgggctggttgtgaggatgatgggggatgatgtctgaacatggccacttgtagtagttgctattccctggcggccactccttctccttacagacgtcatacttactcttatttttgtttttattttttttgagacaaagtctctgttgcccaggctggagtgcagtggcgcaatctcagctcactgcaacctccacctcctgggttcaagcgattcttgtgcctcagcctcctgagtagctgggattacaggcacccacccccacgcctggctaattttgtatttttagtagagatggggtttcaccatgttggccaggctggtctcgaactcctgacctcaggtcttctgccagtctcggcctcccaaagtgctgggattacaggcatgagataccgtgcccggcctatacttattcttttctaaaagctgccctttgctgaatgccccaccgtgaggctgagcagaggatgtgtgagctggaaagtgtagaaacccctttcccggactttctgaaactgcaacaccgtggatctgactcagggttgccaaagaactctttccacacttctgcaatttcacaaggatgccaatggccccattgccaagacgcatagtttgttggcggactgcagttagtggatgttcttctggtgaaggggtggcctagctactgctgcttgggcgctgaacctggttggtctcttggggcatgccccgtattgtttactgggaggagacctggtcaggctgaaacacagcagatccgtggtaggaaagaagaacagatgccgcctggctttgggagagaatctctcttctcttgctgtttagttcctggagtctgtgaagtgcctgtggtatgtcaggctctgtgctgggaggtgagagagaggaaaaacaatagctatccttgatgtagtgcagactcccaggaggccttcctaggccaggacggggtttgggcattgaagatctctggcttcctgggcacggggaagtcatgttttctcctctctaggtctggggagttgcccaggttgcactgccctggctcccgagtcactgccatctctgcaattctcagacccaggccttggagccccctagactggaagagccatttagtctaatctccctacatagcacttaaatcccccaggagtatttttttagactttgcttccatgccgcttgtgatgggaagctcactaccacccaggcagctttttcctaacttgggcagctttgcttcatattatacctcccaaatctgccctttaaaaaggcacttaaagaaaacttcctgtaacaaagctgttagaggaaagaaaactggactggaccccttgggaggtcatgaaccctcctcattagccaccttccccatcaccggaggtgtgtgaagtggaagctgagctcccacttgacaaggaggatggaagattgttgatcgttagcatgtccagaaaagagtagggaacctgtgtgtagccggggaaattgaagactttcaagtggtgctggaggaagaaggagtgaagcccgggcctccggctttcctttccctttgctctgtggcctgcccttccccctccataaggcagggaaacacaagtgggcctggtgccgtcccctccacccccccagcccagctctgcccatgcagctgtcccaggccagctgtccaggccccagctgcccggcggtgctggctccctttgccccaaagggtctgaaggctggcggctggcactcctggattttctggcctctgagtcagggtgagaacagtcagcttccagcttccctcttcctcccggggccctcccctcacctggggtcttttggagtggagggggcacagcatgcccaagcatggtttgtgtcatttcagaagcacaacttgtgtcatcggggagactgtgaaaacttggaaacaacctgtgtgtccaatcttagagtatcagttaaatgcttttatgggatggccacatctgagactttaacctggggccactggggttcctgaatgggtttcagaggtccatgaactcccagaaattattagcatcacaaaatgctaactacacatgaattttttgggggactctgtgagcccccaaatgttaataagtactaataggatggaatcctatgcaacatgtgaaactatgaagagcattttatcaacatatagagagtgaagattgtagaatgaaaaaaacaggctagaaaacactatacagaatgagcccaattttgattagaaccatttgttatacacacacacacacacacacacgaataatagctactaaaacgatgacagtttttaatctctggagtgagatacattttgcttgatttctgtttttctgtatttgttgggtgttctacaatgcatgtttattccctttgtaataagaagctgggacgctcagcctattttctgagaagccaaaattccccttctcgccttggcagaccccacaactcccagcccctagtcccagagggagtctgtggaacaagcacaggtctcacctctgggtctctgtcaatggatcactaacttcccggccccctgacttcaaacagagtccatctgtgcaagttccagagcctgggtcatggaggtgaggggtgagggtctccctctgtcattttgctcccaccagccccagccccagccccagccccagtgcagtggctgatccggatcctaactgccaagcatcaagtgcctggcacacaagactgctcgtgggacctcatttcctagctgtgtggctttgggctagttgtctaacctctctgggcctctgcatcctctaaggcagggacagggttagtacccacctcctggggttgctgcaagggcagactgagctgatcccctcactggcctgcctgccttctctcttccaggaagctccaggactggcgggatgggctcagcctgtatcaaagtcaccaaatactttctcttcctcttcaacttgatcttctttgtaagtatgtcccatgccgtcctgaccacctccgaaaagattctccttccaggggcatcccagcctgagcctttccagagccgaccgggccggggattggggggatttggtgggtagggactgaggacgaactatctccaacggaacctagttggggtggtgaggagattccctgccattcccagctggtcctttgaccaagcactggattcctgacccggccttcccctctcctagatcacccaaagcctgggctggcggtgggtatggggaaggagaggagagcccctgggcatccccctaactcaacagcaggagctgctagaagaagcctcttagcatctctctagtcctgtcctggcccccaccctgcccatgtgaagaattgacctgtgacagttccaggccccagttgcccctatcacacccccgtccctgtcgtgggaaggtatctccctgagctctcatagggagagcaagagggcgccaggcgtggggccagtgaagggcacatacctccttccccagacccaccccagcagatgggccatccggatgtcagctctgtggacattgactgctggttttcctggggcctcggttttcctctctggcctggcatggactgcctcttgccttggagttgctgggatggtggggtgtgtgtgtgagtgagagtgtgttgttggggggcagtgccctggagaggacttcatagcctcagagtagtgttgggagcgctggcttccctgtgttgacggtttaaccctatagtgttaaaaaaaaatcaggttgtacagtaggatgtttcttatgatccaaagttttaaatgtacgtattcattaaaaagtgagtatttttgagaggagaagaaaatacctcaatgttaatgttgggattcttgggaattttgattttattctttatgcatctctgtattttcccaattttctacggtagatattaattacttgtttggggaacagggggtttacattacaagttacatagtttatgggaagtttgggaaataaacaagaatcattctaaattccccttctggccagacatggtaggtcttgcctgtaatcccagtgctttgggaggccaaggcaggaggattgtttgagtccaggagttctagaccagcttgggcaacatagcaagaccctgtttctctacaaaaaaaaaaaaaaaaaaaaaaagaattttaaaaattcccccttcacagctttaacccaatgcacagacatgtacaatgtgttcctggcacccgcacacaagtgttcatacacgcatgcacacacacaggaagccctggcgctgcctgccttgctttttttccaccctggccccggccctagctccctcctggaggaccctgtgaggccccactgtggctctggccctctgctcatggcagccgggcctggaacccaccccaggccgggcttgggcttccccagcttggcggtcaggtctctcctggctgccctaggactttgggaagcagctgcctgtgcaggcaaagccaagcttttcctggcaagcacttggtgtctgggcggagacccagcataaaggccaatgggccaggactcgggggaaggggtgcgtgggcactgtagctctatccctgggggctttagggactagagagaggagcctgggctctggcctaggagatcacggagcttgggtttcagtgataaagaaactttccttcatgcagtgggggttggggagaccctcatagagaaagggagtggggttggtggtttcagccagggtggccctttctgtcctgctcgcaagttgccctgtggaaccagggactggaaaagctgctctctggccagggcttggcctccttttggctcctccaggggctggcaggagtcaggtgttaactgtctgtgtactggggcctaggatgacccatcaggatggtggaggggggaggggcagcttgtatgacaggagggtgagagtgaaagaggagggctggaggaggcagaacgggcttgtttactcctcagcaaatgtgtatctgacacctcagcatcttcagatgttcagggcggaagagccctgattgctatacttccggagcttgtgtcctagggagcagtgggcttccatcaaataactactcaaatgcatgaaaaattgcagttgttgggggtactaggaacagataggctcttcggaaagcagatgaggctcttggcctggtcatggaggtcagcaaaggcttcctggggttctgggtgtggctttggagagggggatcctggcagcaggggcagccggtggaggcagagtgcacctccccaggcatagacccggccagcctgcctctttgttttatgcacattgggaggggtttcgtggttggatttgtggtttggaaaaatccccgtggctgctatgtgtgctcgcgcctgcgtgcatgtgcacctgtatgtctttgcctgtactccctctggactccagactccccagcgcattgccacttttctcaggtccaaaggaatgcagaggcactggtgctgtggctatgctggggaaggacgctcactgctctgagggtcctggctcctgatgggtcccatctggggattggggaagggctgggggagtgattaacatggggcctgccccacagctccagtcttggttcacagagaaaaagggggtgccatggtgccttgcccattctggtaggctgcccagcctcctttctggctctgccacagccccgtggctaatccagccacatctgaccatcaggctggggtcatcagacctacagagggactgaatgggtagccccggggactttgctctctgggttcctcttggcaagctgaggagccagctgagtagtgtggggttttgatctacttgggattatgtgtgccaagaggggattttctgtcctgcctcccattcccttttggtaggggctgtcctccctcctgtcccaccctgtgaatgtgggagggaatggggcaggggctctgcccacatgggtctgagatgcagagggagcagacgtgggcctgagcactggcccctgcctcgctgtgctgtggggtggttgtgggctgggtagggttgcaggtcttggggaaccaaactcccaggtcctggaaagcccccatttcccccagctgtgcaaattaaggtggacccaccttccagcagactcttctcctccccagtgtctcaggggcttttctgtcccgagactggctttctgggtgaaggcccaggatggatccaaaatatccctatagctcacctgccaccatctggcttccagtccctgatggataaaatcaaggcctcatataaaattccgtgtgtataaaatgaggtcaattacaaggcccgtctcactgggagagaggagaggacagataatacctcagtgatgattctggtgggagacactggggggcagacgtggggtggtcaccgtgcctttgtggttgtagtcatcagtcacagtggtctttaaggtagcaagtacaagggtaaagggagagaggcaaccccctactgagccacctgggccctggggcaaaaggaaacattgataatactgatactgtcaacattttatttcaaagtttaatagttcagttatcatggatttttggccttaatttttttttttttttttttttttttttttgagacggagtctcactcttgttgtccagtctggagtgcagtggcgtgaccttggctcactgccaccgccgcttcctgagttcaagtgattctcctgcctcagcctcctgagtagctgggattacaggaccccatcaacacgcccagctaattgtatttttagtgcagacggggttttgccatgttggccaggctggtctcaaactcctgacctcaggtgatctacccgcctgagtttttggtgcctcctcatgtgttacacctgaggcaggtgcctcgtgccttgggccggtcctggctctggtctttgataatgatagaatgattctgatggagaccctgtgcccaggccagccccaggctcggggctctatggcagctgctggcctccaacctgagattatgggatgatggctgaggtgggaacccagggctgtgatacaggtgggagtttcaagacgggtcatccaccaggtgggcccagtccaggcccccactaatggccagccttgtgggttgacacagggccacccccacctccaaagggaacctgcatctttgcccagatggcaggcacttccccagcctttgccagctttatgggatggtggatcttggctgggactccacctggggagatgagctcagccctggtagatgggagagaggcagggaatccctgggcttgggatccttatttgtaacacctcattcattttttcctttttgtggggggcagagtgagggggtcttgccctgtcacccaggtcatgtcatgaacacagttcactgcagccttgacttccctggggccaagtgatcctctcttctcagcttccccagtagctgggactacaggcatgcaccaccacattggctaatttttgaaattttttgtagagtcaaggtctcactgtgttgcccaggctggtctcaaactcctgggctcaagtgatcctcctgcctgggcctcacaaagtgttgggattacaggcatgaaccaccgggcctgaccttcatttccctttctagtcctgcatttgcagtttggttcatcagctcattcattcccccagccacttagcacccagtgctgtagagctgctggggatgcagagctgcctccagccagccctgccctcagggagctcacagtttagccagagaaaccaacacagcagttagacccagtcggaatgactgttaagaagggtgggacagtggttgctgcagaatgggggcacccgagtctgcctgagggggtcagagaaggctcctgtggcaggtgaccctgttgttcagacctggggatgagttgggctttgatgttcaagtccacggagggtcctcctcagagcctttcttgtttgggaagctcccaggccctgaactgggtggagtcggggggatgagctgagaaaagagccaggagatgtggcaggaagggtgcccctggcaggaggctgcaccaggaggcttggctgaatcacacatggtggaggggggcaagatgggaggcaggagggattccctatccagggtcctggtgtctggcttgctgcgatgtgggaccggaggccatctggacatctctgggctggagaagggtggatgtggtgccctctgtggccccctgccctgcccaccctgacttgggttccagggacagctggcagggggagggctatctgctcttggctccccattaactgctcccttctccttccagatcctgggcgcagtgatcctgggcttcggggtgtggatcctggccgacaagagcagtttcatctctgtcctgcgtaaggacccctcagcttccccagacccaggcccactgaagaggggagggccagggcgcagatacagctgctcccataagtgcttcggcttcaatgcctgttgcttttcccgctgacctcagggatgtggcgaggtcctgctgcccaccactgcccatggctccctctgcaggggtttccaaaaggaattttctcttcttccccgaacaaagctgctgttgtctgggggaacactggggatgagggaggcttgttttcccttcctggccccttcccttggccctgaccttaggaaagcctcttacattctctgtcccgtcacttgcccatccagcagaatgtaggcaacagcccctcccatttcacagggatgtaggaaagatagtcaggggctgatgaggcacctgctatgagtggtgcttcgctataagcctggcagcacctacgtgggtcaggtgtgtgcacagatgaggaaggttccaggcacagtcaccaattatcaggctcctcatgtgccaggcagtttgcaccgataaactgtcttaatcccaccacagccctgtgaggtagatactgttctattcccacctcaccaatgaagaaacagaggctcagagaggttaagtcccttgctgaagttcacacagcttctaaatggtaggtgtgggactcgaactccaagagctttggtcctaaatgcagcacatggcagggtgagccacagtgtggaaaccccttctttcaccagaggcagaaggaaaggggcctaaggcatttttacagggataagagcccttctgcgcctgctcggcctcctccaggaagccgtcagggcctgccacgctgacttctcaggggctccctgtggtgggagagggaggcacagcggaagcccccaggggacagccgtgccactcccctcgctgagtttggccttggctcacttctcccagcagctgcccaaggcagctggtttggaatgtggcccatgacagctgcttgatttacataaagcggaacctagctaggatgtgatgatggaggggccacatctgtccccctggccccaggggctaggcctcccctccaggagatggaaagcaaggatgatctacactctagccacatctgatgcaccccggggctatcagtctcatcccctttcaccctccattctggggttagggtgggtgggctacccgtgccccccacattctcctggcctgtgacacaccctccttggccccattaggcccagctctctacttcctgagtcatggcccaacccagcaggcactgcaccccagggcaaagtctagaggcccagcctgcccacccacatttctgccctctgcgccctgccctgcaactggcgcagtgggggtgagcccactgggtggggagagcttcctgcatggctctggcctcctccctgttcgggtctgagaatctcaagctggccggaccttaaaggtctactatctgcaggagggggtgcattttacaaatgctttggcccgagccccacccaccccaagggacctgactcggttggtgtgggtgggagcctgagtgctggtgttttctaaaaagttccccaggtggattccccaggcagccagggttcagaaacactgatcctcttgcctggtcactaggcacttgtgtaaactgaggccgggggtggggaaaaatgacttgctaatagtcacagagcagctgaggggcagaactggggacagctctttccctaccgagttgaatccctgctctgagtccactgggctgggcattcctatcctcattttacagaggaggaaattgaagcacagagaggtgtagtaacttgtttaagggcacacagcaagctggtaggggagctggctgcagatgaggtagcctagcttccgagcccgtgccttgaacccctggaccacatggctctgcagccacatgccactggttagtaccttagtaacaggaagcactttgcaatgaagagcagactctagcctgactgctggggttcgattcacggcggtgctgtccactagctgtgtgactctcagcacattgcttcacctctctgtgcctcctcacctataaaatgaggatcgtaatagagtgcacttactgtggttattgtgagaaattaaatgggcctctcatttttatctgaaaagagtttgggacagcccccagtgaaaaaccctacataagtgattgttagctaaattttataatacaatttaatccttttgccatcttcaagtagcaggctttagacccattttacagagaaagaaatagtaaatggcttgcccagggtcagagtgtgttggcagcagagctgggattagaatctacttttcttatccctcatccctttctgtttgggccgcttcctttggtcccttctaggcccagaaagactaaaaggtgaaaaaaaaatttttttttccatgccctgtggatggcctaccccagagcataccctcacctacttcctaagtcagcttgctcagatatggggtaggcctgggatcctggggggagacagggaatggcatcaattaaatgttctgagatacggagacctcgcagtttgtctggtctcccaggggaaggatctgagttggggtctcagccctgatccttccctgccaggcaccttgcagcctgctagcctttctgagcctcggggtccttgcagacaaatcaggatgtgagtacagccacagagggtggttgctgaaattaggcaggatgctttggataaagggccttgttcagggctggcacacggcggctgtctgggcaatgtcagtttcttttttctgggagtaatcactgggaggaattgttggaagcctcaacccaggaagtttaggaaaagtggaattgacagcctctccctgcccacgctgatggctggggctcagtgccagaagatccccgcactcaccctgaggaaggtggggggctcctgtgaggaactgggtggaggaagccttgagagtagggttggccagggctcttcctgagctccagaacattctgtctgttatcaggaagcggagctgaatcccacagactccctcccgtcctccagtttgatagttattctgtaagggcactaacgccccttggggaccaaggtggggacctcggcctctccaggatccccagggagtcgtggccagccccaggcctgtattctccctgctgatggtaaaggggttggtcctggctgtgcctcagtgcttaggggagcagattaaaaacgcaggtccttggcctcctgctgggagcgtcttggtcgggttgtaacggactcaagcatctgcatccctaagaggctcctctgatccacactactctccagccttctggagacgccagcaccctcgccctccaggtgcgtcccatgccctgggggtacagtgtacccatgctggtgagttagagatgacatgagctttaccctgtgtgatgggttgggtgtcttaggaaatgttggccaagtgcccctgcaggactcctgacctctacctcccggaatgggcctgtccacaggtagctctaaagagggtcttagccatcaggcccattcctgtacctcctaagcatcatttcctcccgggcttctttcttgctctcactggtccgttctctcaccttctttccaatcttcaaataaccaagctcctccttcctcaggcctttgcacctgctgtgttccctgcctggaatgcttttcttacagatctttgcttggctgacttcttcattcatgtcttggctcaaatgtcactggctcaggctggccttcgtcgacccattctgaccctctcccagcccagcagttctctgcagttagccagctttggtatcttcatggcgcccaacacaaccagaaaacctgtattgtgtactttttgtctccactccccacccccaaatgtcagaccttgttagtcactcttctgcatccccagcaactggcacagtgcctggcatgaagtgggcacccagtaaacatttcttggccgaatgaacatgcagcacacctgtagcaatacatgtgccccgtgcatcagtggaaagagtgtggcactggagatttgcatattttcaaattccagctcaggcccttgcctgttcgcctttctgagcctcatttttttcttctgtgaaatggccatgctagtgcctgccaggcagggtgatgtcagagttggagacggcgtgtggaaagcccatgaggcacagtgagtgggcaagaaaggctggtgtttgttattatatggacaagaaggaaggcgggttaaaaatcagcttggaatcttaatgtcagtggcccctggagaaccagccagcctcttgtctgtcaattccgcagatattcactgtgcacagcacctcactgcgagaggcgctgttcgagctgggggttccccaggaataaagtgaagcttctgccctcatgcacctcaggtccttggtggagggggagagcagacaatgagcaagaagaatcagtgaaatgtagtctattcaatcctgagaagccttacgaagtaaaaaataaagccgggaaggggcttaggctggatgagggtgtggattgcaattttactgggggagggacacaagtggggatgggggtgacctggttccctgttgggcagtgagaagccagcaggggaatgcagctgaccccaacaccctggctccaaagaggggatccggaagaagacctggacggttaggccaggtgtttatacctgctgtgcccactgattttgtacttcttcttccccctagaaacctcctccagctcgcttaggatgggggcctatgtcttcatcggcgtgggggcagtcactatgctcatgggcttcctgggctgcatcggcgccgtcaacgaggtccgctgcctgctggggctggtgagtacggatccctccgcagctgcctgcccatttcctctcatccagccgagtgcagcctgaccgcggcgctggccgtaacatcgggtggagagcatctctcggggcacgcaggctgggtgcacctggtcggggaccctcagctgactttgtgcctgctctgtgtccccagtactttgctttcctgctcctgatcctcattgcccaggtgacggccggggccctcttctacttcaacatgggcaaggtaagcccctctctccctccctcttcactgggctggaccaaccatgggggtgattgactgagtgtgggggatggacaaggaacccccccagttgtcacagacagatccagtaggtgtcagggacggcctcctggacactattccttgtgatcaaatgggggagcgttagaagagaaggcggcaggtgtgggcagtccccgctgggcctggatcttagcctgacccccctgctttctagctgtgtggccttgggcaagctgcttgcctctatgtgcctgttccaccatctgtaaaatggaaacaataagaaaactgaactctcagagtggttgcaaagattattcgagattatctgagtgaaacacatagcgcatggcaccataagtactcaataaatgttattcttgttattattaagatactttagcaactattaaatccatgccactcacccacaaatgaggtttagaaggagaccgttaataaaaacatcagtcttgtgtccgaggggagatgttcagctttcagaaacagaaaatcagacttacagcggcttaaagttgaaggacatctgtggttgacttgaccggaagtctggtttggaagctcagaggccctggttctggctgttgagcatcctcgctgggatggctttcctgcattatgacacttacctcgtggttccaagatggctgccacagcaccaggcacgatgtctgtgccgctgtggcctgaagatggggaagtgggcagtgccagacatggccatcccttttatcagaaaaggcgcagtggctcatgactgtaatcccaatacttagggaggcagaggtgggaggattgctctgagactagcctgggcaacatggtgagaccccatttctacaaacaaatttttaaaaatgctagccatggtggtgttcacctgtggtcccagctactcaggaggctgaggcaggaggatccttgaggccaggaggttgaggctacagggagccatgaaacagagcttggggcaacagagtgagaccctgtctcaaaaaaaaaaaaaaaaaaaagtcctccaacagacttccccagactgggttacaaagccacccctggttgcaaaagaggctgagaatgtgagtatccaactttcagactctaaagacagaggcacaagagagaaaggagccaagaatggctgttgggtgagccagttaattgtgagtcacagttatcacgtaagaagcacctactgtgtgcacgtgggatcttctagaaactttccatacagcgtcttgtcctcacaatggctctgcagggttttatgttgacagatggagaagcagatgctctgagatgaagagcaataacaacatagataacagtgactctaacacccaccatccctccagttgagtccatgcacagcatataccaagtacagtgttgaccacgttacactcctcctctcgcagatcctcactaggccctctcaaggtcgtgggagaatccccgtcctgcagatgaaggagtaaggacagcctaggctccctgactccgagtcctgagttcacccgtccccagaccctgctgcacatggcctgtggcctagcagacccttagggtccctgcttccagtgccaccagttcttgtccaccagggagggtggcagagccggcagccagataggctcctgcccttcaccacttgaaggtcaagttgcctgagatccctcttggaaggaaactgagaaaacactataccaacatcaacatcaacaaataacatttaatagaacttagaacttaatggaacttcacaagacaagatactcttggtagctaagggctaacttgggcactgagcttcctggcagtcaaggcaaaagtggaaaatagtggattttgtagatgaaaagcagcttgtttggctgtgagacaggaagccagcagttaagggagggaaattcctttcccagaaaaatggtcatggggtcaggtcttcatttctgtcctatggcactgagcttctttaggacctagttagtgatataatcagggtggattagaaccaggccccagtgagccggtttctatgactcagaagctggtcgcctctgcagggatcttgggcagtccaccctatgtgattcaccatctcacagtaataaatatggcccaccaggttggcaccaaccacatgccaggagctgagctagaaaagtgagctgcaatacatgttcaaatttacaaacattttccatttgaagaaactgaggcccaggaaagcaaagtgactttcagccactgacacacacagcttggatgcatcagagtggggatttccatcctgatgccttggagtccaaggcccatgcctccctatccaccacgctgccctcccgccggctgggtaactctgcttggctgataatgaggagcttagcctcagaggtgtcctatcagccccagaacaggacttgtttggagatttgggtttctcgaccccagccaagctctgtgcattgcaccccctgcccctgtcttccccttcagagtccacaccccctagtcccagcctgcctcaccttagtccaccaccatcttttctggaaggcagggggaaattttctggctttgctgaagaagttctggtgccactgtatcgcccgaattggaatgaacaatatatttttttctttcgcaacgcatcataaatctcagtggaagactaaacatactcttgatgtgtttattctggcagacaaggctcagcgtgggggtgggacttgtttgaacctaaggaaaagaaaggccttttgaaaggagatagggctcccgtgcaggtgggtgggagtgaccctgctgtggtctccagggctgccctctgtccttcctgcctctgtcacccgcagccactcttctcagggcagcgatggggaggttggggaccttggcatggcctgtcacctctggagccttgggttctgcttctataaattgagaataaatctgcctctccctgctctaccactcaggttgaagtgaacacagactgtgacacttctgtgaaaatgcagaatggtgtccaagggtcttgactgtggaaccactgctctgacattctgggcatgctactcagcctccctgtgcctcagtttccacatttgtcaaactagtaacaatataggcccactgtcccttctctgcaattctgaaatccaaagaaacactttaaaaaccaaaagtagcatttgcaactaatttggtggcaaaattgaacctgaacagaagcaaggctatgtatggcctttgcctgccccattcgggtgtccctagggaaatagaaatgagactcactgcaggctgctgccccagcccccactagtgggtgtgatctgtccctccaggccctttctaaaatctgatcctgtctcgagccggagcccccaggggctgccttgcagcacttcagagatgaagagcactaacaaacgggaagggcgtcgtgcggcactcagccggaggctgatgttgctggcatcattgccagtgtttattattattgccgccattattcacttcatgaaggcctggtaagggctcaataggtggcagctgttcctgctgccctcgttgtcagcagagcaagggctgcgggaatggggatctgggcacggtgctaagatcctcatctgcttgtttatccagcctctggtgagcagagcccagccctgggattcaggggccctgtgttttagtgtgggctctgccgctgattgctgtgtggcttcggataagttacccagactctctgatccacaggcgagctcttgggccatgcccagtgcaggcagtcagggattctgacttgttctctctagagagtggaggtgggaggagtgagaaggaagtgaatgcagtttgccctttcctgtggtgtgtgggtgctgagctgggtgcacttggcaggccatacctgtgccagggaggcccctgaggctctgagtgctgtcacgctcaagcagaagacattggaggggaaggggctcacttggcctggctgggagccagaggtgggggctgtgacagtggcagtggctggccagacaactccccagagatgttggtcaggggaactgtgacttccttcttgtcctccttgctctcaccctgaaagccccaaattgttggtgcgcacataccctcatgtgtgagacacaggtggcgagacgggttcctaggggacagtgtggttctctgtgaactgtctgcttgctgaattagaacttcctgattctctggcttggggttctcttgcgatggggcagagggaggaagagcagctggagcctgggacagggagaggtgacctttctctcccctgttgagaagggaatggaggagtccaggctacccctctggaaagggattatggaaagacacttgggctagaatctctgaagcacacgctggtcactggctctgcattctggggtagctaattacgtggattgcagctggacttgcagaaaagatgcaggaagcgccctcatttcctatcagggtactgggatgcagcctctgagctggtgtatctgtattctagcaaagcatttgccaacatctcatgtgggaaacctggagaggacaggaagatgtgggtccaattcatgcatttataccttattataaggggctatttcacaccttaaagagcatggcaagaggtctgcacagcaccccaaggggcgggcacaggagcccgaaaagttaccctggagatgtagtctagtctcaagtatctggatgacatgtgtccttcgagagagggatttgatttgttcctgtggtcctagctgggacttgggtagctgagagaggaggaggatgtgaactaatacaagtgggtagaagtcatttgagcagaacttaaattgtatcagagcctctcaactccgcaacatgctattgtgtgaggtactgacttccccatcgcagggagcatttaagcagagcctaaaaaagcatgactcttacatttggatgatttgctggacgcaaaggtctctcctaactctgactctgtgaaaattcacactaaaagagaagtcaaagctcagcatttgggtgggacgtgagtagagccatgcagaggacagcagggtcatggggaggccctgggcagcttgccgaggctaagatcccgggtccctggagctgcacagatcaaggtctggtcatgtctctgctgctttctatctatgtgatcttgggaagttgctccaactctgagcctcatttttctcttctgagaaatggggaggagggagacagggaagacagggctggcttcctcggcattcaacctatgcagtcacacaggataatctgctgttgctgtattgaaattcttttttttttcttttctttttgagatagagtcttgctctgttgcccaggctggagtgcagtgggatgatctcggcccactgcaacctccactttctgggctcaggtgatcctcctgcctcagcctcccaagtagctgggactacaggcacacaccaccaggcccagctaatttttgtgtttttagtagagatggggtttcaccatgttggccagactgaactcgaactcctgacctcaagtgatctgcccatttcggcctcccaaagtgttgggattacacgtgtgagccaccacgcccagctgaaattcttaataatttttaaacaaggggccctgcatttttgctttgcactaggtgtaaattatgcagctggccctgggcaggactctttatggcatgtgacagtgactcaactgaaagtagccagagccagcagaaggctcagctggatcccaaaggctgctgctgtccctattcacccttcagccctaccctcctctgttggctcccttctcgggcaggctgtccccagtggagcctgagggtagcccaggtcctcatcctaccacattgatggaaagagggccgggtatgtgagcatgggtctcaagcccatctctgaaccactcgccgtgcctgtgatgtggatggcactgagtggcagcccaggtcttttgcctgcttctggcatcgagggagtggggcctcctcagctccatggagaaatagaagggtggttacatccaaggagtgggtttctgcagggcaggcagaaacaatggagcggtccctggggggatggagggagctcatgaatgtcttctcctgctacctccctgtcctttttgtctcagtagctacctggttgccagggtgacctccctgcactcccagcacaggcctcctgagcatcagctccaagctgaaccagcccctgtggccatggtccccgtggcccaggtgtgtccctcaaccacattctggactgaaagatgttgtggtgtttccatggaaaccacccatctaggtggaaaccacccagcttccatcaccttctcatttcagggaggctgggagagaaacagggaagtccaggctgctgtgacaaccacgctggggtttaaacagagcctcagtgcaacatgttgtgaggaagctgggtgggtggggaaggatgtgggagaggcagctttccgcacagatgcttctagagagcccctcctttccacaccgtggggatcacccacccactggggttgagaggtggacccgagatgtcagatcacctggcagacagccccagctatgtgactcaggcaaaccacttagcttttctgggccctggttaaaactgggtatagccgtgtggtttaaatgccaataaagcttaataggtaaaaacctgggttctgaaatcagccaagcctgtgtgcaaacctcacttcttccgcatgttggctgtgtgactttgggcaagttaattaacctctctgggtttgttttctgcatctctataatgagggaatggggtgaatacctaggccataggtctgctgtgaagattcagttgagataatacatttaaagtgcttaccacagcaccaggtacataacaaacatttgataaaagttagccactattagtgttgggattaattactgacaggaaagctttgtaaattgcagaactctgtataagggctttttttttttttttttaaatatcatgctgagagctttattgagagaagggcagggagcgtcatcagaggctggtttcccagcattaatttttttttttttttttttttttttttgagatggagtctggctctgtcgcccaggctggagtgcagtggcgtgatctcggctcactgcaacctccacctctcgggttcaagcgattcttctgtctcagtctcgcgagtagctgggactacaggcacctgccattcacacccagctaatttttggtatttttttttagtagagatggagtttcaccatgttagccaggatggtctcgatctcctgagctcgtaatctgcccaccttggcctcccaaagtgctggaattacatacgtgagccaccatggccagccccagcattaatttaaccaagggagctgggtgaggagccagggctgcaggtccatctgcaggatatgggttctctgagcacagcgttcattcaaggactgcccatggggagctgctggaagctccaccaacagggttccctgggagtcaggctctgaaaccccacctggaagtacctgtctcatttctcccaattcttccttctcaggaaccgaggtgggaaggtgtgtggccttctccttggcatccctgccttctagggtccctcgcccccactgccttgaccagtccaaccatgcatttgccctgaaaggtctctgggcaaggtccatgtgagaggctaggtggagccaggcaggggctggctctcggaggctcccctcccacccaggcctgcttatcgccgagggaggccctgccctcagcgggctctgggtttgcctccttttgcacaactgacttatttagaaaccccttctctgcctgctttgtaaatcagtgttttctctgtggggttagctgagagcaggtgctgctctccaccacaagaaggaacccttaattcctgagcagggtgaggaccagcataggcaagatgtagatttgggccaggcgaggtgtctcaggcctgtaatcccagcacattgggaggctgggctgggtggatcacttgaggtcaggagttcgagaccagcccgggcaacatggcgagaccctgtccctgctaaaaatacaaaaattagccgggcatggtgactcatgcctgtagccccagctacctgggaggctgaagtgagaggattgcttaaccccaggaggcagaagttgcagtgaactgagatcctgccactgccctctagcctgggtgacagggagaccctgtctcaaaaaaacaaaacaaagcaaaacaaaaaaaaaaaagtgagatgtttttggagctctggggcaagtagccaggtcccagaaaggcaactgacctcacactccggctggctggcactgctggcttggggcttgggaaggggtgagggaggatcttttctgttttgttttttgttgttgttgtttttgttgttgtttttgttttttgttttttgagatggactcttactctgtcgcccaggctggagtgcagtggtgcgatctcgactcactgtaacctccatctcctgggttcaagcaattctcctgcctcagcctcctgagtagctgggattacgggcacccaccaccatgactacatagagggaggatcttttgaccatatagttgataccgaagttccaggtccctcagtcttggggccccctccaggcatctaccctgctgtcttgggggccctgtttggagaggctgcactctggtccttggaagaaggaaactgagctgggctttcctccctgtccctccttctccctgaagctgccctgtgggaggtgtaaggattcaccaagaagttgcatgggtctggctctggtgcctggcagaccatggtggttaggtgtgcattcagcattcacgtaccccacacaactattctgtgccaggcttggcgctagccacgggggaccctgtagtgagcgtgccagatgtggtccctgcccccacggagctgatgtgctagtggagagagatgataagccctgaaaaccaacaagcatgtaacgtcagtgctctaaagagaaatacagcatgctttcccttgtgggataagggaggccggggaggggtggttgattggttgggggagaggggatggggaagggctgatattttgtagagtggtctggtaaggcctttctgaggaggtgacattggagcagagccctgaaggaagcagagggtgagccatgttaatgtctaggggaagagcattccaggcggtgggaacagcaggtgcaaaggccccaaggcaggagtgtgcctggcacaaagacagcacagaaatctagtcagttgaagcagagggaggaagaacagaggacagaaggcctggggaggcagacaagtggtgtaggacctcctaggctgttatggggacaatgacggtgggaactgccctggaggtgggaggcccctacggggttttcagcagtgacatgagaatattgatgtttacagggccaggctgctgccaagcgcagaagagatagtggggcaggagtggttggcactgcctgcatcgggcaccctgggagcgccaggaaagtggctggagccatgagcgtgtcccagggttgctgaggggaacggggggaggcagtttaagtaggggtgaccacaggtgggcacgggtttcaggaaatctgaccctgacctttgtcctcccccctgcagctgaagcaggagatgggcggcatcgtgactgagctcattcgagactacaacagcagtcgcgaggacagcctgcaggatgcctgggactacgtgcaggctcaggtgaggtggggcggggctgcaggaggctctctggcctgggtgtccctgcatttggggctctgtgcacccacatgtctgggactggcatctgcagtgctcgtgtgtgcctgacagtttgtaggagagtgtgcttctatgggggcagggcaccccagttagcaccacaactccctgctcagggggcccagagactcagaggcagcttcacagctctgtgctcccatttgtggccagagagcatgggggcagttgtcagccctcttatctcaagctacactggggagcgttgggagctccactctgggttttaggaaactgggagccaaggctgatatgctgagaagtcccagtgaaggctgcctctggggaagggcactagctggggaggtgttggggagccttctagggcaaaaggagtattttagccaaatcttgatactggtttcgccagtatgtgcacatacgtaaaaatgcaccaagctgaatgtgtgcccattagttcatgtgtattatacctccattaaagtgagagagatggatggatggatgggtggacagatggacggacggactgaccgactgaccaacagatagactgaccaggttcccagcctgtctcaatagtgatccaatgaccacctggctctcctttcttgtggtcccggatgctgcatgtgcccttggctgggacctgacatctctgatctgcaatcctgtgagggcgcaggacacagtggtcacttagggcctgttgacacctcaggggagggatgtggagtacaaagggcatgggcagcaggagaaagcctgactcagcggcaccaggagagtttgcagagaggacactccatctaggtgacatggacatggccattttctcagtggaggaaggggagagcgatgttttctggccctgaccgaggagatcaggtgtgggggttgtggcagctggaaggcttggtgcacacaaggaaatgttttggtcgcatatgtagtttgacccacaattgctgagactttgctaattttagcaaagtctggatgtcaccagtgacataaaccagtgccacctgacaagggacctgggaggagaagtgggtcccttgggaggtggtaagcatcctaccctggaaagtcattggctggttctagatgattctgatgctgtcagatgctgcttaggccggtggtaagtcagactcccaaggcctggagtgctaacactgccacagccgctagacctttgctgagcctgcttcctcatctatacaatggggctactgacccatgccgtgtgagatacattgttaaagcctgaagcacttaggcagcatttattatgtggtatgttggtggtgatgttttagtcaccatgcacatccatggagacacaggcggaggtggcgtgtgctgctggggaccaggtacagccggagtcaggccaaggggttgcttggaaggaggctctgtcgtagacgggccaaggagacctgcctcattttgctctggtgtaggatggcctgtgggtgcccccagccttgcagacctgtgcacccctcagaggtgccagccttttcttggagagaggaggcagcccggctgctggaacaagcacctgtaaacctggattagaaactgcctggagctgagcatttctgagtgtgcctggcacgccccctgctggccactggctactggtcaggcgacacccctcggagctaggaaggaagcggtccaggaactgacccctgctgtgaccgtggctatcccattgaatcctcccaggaacccccagcattgcggggattcacacacagagacctcctttagcacacagagcccggaaaggctttcttctctctagaactagagcattttctcctttaaaatggcagaattgaccagctagccaaggtggctcacacctgtaatcccagcactttgggaggccgaggcgggcggatcacttgaggtcaggaggtcaagaccagcctggccaacatggtgaaaccccgtctctactaaaaatacaaacattagccgggcgtgatggcgagtgcctgtaatcccagctactcaggaggctgaagcaggagaatcgtttgaaccctggaggtggaggttgcagtgagccaagatcacgctgctgcactccagcctgggtgactgagcaagactctgtctcagaaaaaaaaaaaaaaaaaaaaaaggcggaattgaccccgtctcctttttcacttttcactttttttccttttcaccaggaagctcagaggcaaatctcaactcctgcactaaagttgaacggcctttcctaagcttattgtgctccccacacctatgcttggtactttgcctgcctcatcccatttagtccttgtgatagccctgtgagttggggattttaattatccccatttacagatgaggaaactgaggctagttccttgatggaggttgctcagctggtaggcggcagggctgggattgtaacccagtagcctgactttaaaccctgcactgtgaactgtctgccgtccattctccttgtgccctgcacacctgcgctccttcaacttgaacttccttcctactctgctttgtatttttgctggtcctggttttgatttttctgctgtacttgtagtttatgatggttcggctgggaccaggggcctggaagtggcatatctcagtctctgtcctggggaggtcctccctctgccaggagggcagcctgcctagggtgagccgtgagcacaagcagtctgtcccctgccttgcccaggtgaagtgctgcggctgggtcagcttctacaactggacagacaacgctgagctcatgaatcgccctgaggtcacctacccctgttcctgcgaagtcaagggggaagaggacaacagcctttctgtgaggaagggcttctgcgaggcccccggcaacaggacccagagtggcaaccaccctgaggactggcctgtgtaccaggaggtgtgcggggggctgcggatcgggggcggggctccgagggcgttgggggccatctgggctactgctcagcaattccttcctgcatttagttccttcccttaattcatctgtcatttgtaccttcatctacttctttgttaatgtatttattcaaggaacaggcagagccctctgtaggggcttccgggctgggactggggggctctcggtggttctgcatggcggggtgggatggtgcagagcggggtgatgtgaccgcattctgcccttgcagggctgcatggagaaggtgcaggcgtggctgcaggagaacctgggcatcatcctcggcgtgggcgtgggtgtggccatcatcgaggtctgagccccctcccccatcccttctccatcccaggtcctcctgggttgtctctgttctgctgatctccttggggaggtggtggccaagggggccagcaccccatcagcttccagaggccctctggtctgagcactgtctggctgtgtgacctcagacaaggcactgccccgctctgggcctccctctgctgcctgcatcacagggtggttgtgaggctcaagttgaggatccacttaatccccatgtaaacctggatggtgaggctggggcgtctgaggccgggacacccagcctccctctgactctccgcctctccccacagctcctggggatggtcctgtccatctgcttgtgccggcacgtccattccgaagactacagcaaggtccccaagtactgaggcagctgctatccccatctccctgcctggcccccaacctcagggctcccaggggtctccctggctccctcctccaggcctgcctcccacttcactgcgaagaccctcttgcccatcctgactgaaagtagggggctttctggggcctagcgatctctcctggcctatccgctgccagccttgagccctggctgttctgtggttcctctgctcaccgcccatcagggttctcttagcaactcagagaaaaatgctccccacagcgtccctggcgcaggtgggctggacttctacctgccctcaagggtgtgtatattgtataggggcaactgtatgaaaaattggggaggagggggccgggcgcggtggctcacgcctgtaatcccagcactttgggaggccgaggcgggtggatcacgaggtcaggagatcgagaccatcctggctaacatggtgaaaccccgtctctactaaaaatacaaaaaaaatttagccgggcgcggtggcgggcacctgtagtcccagctacttgggaggctgaggcaggagaatggtgtgaacccgggagcggaggttgcagtgagctgagatcgtgctactgcactccagcctgggggacagaaagagactccgtctcaaaaaaaaaaaaaaaaaaaaaaaaaattggggagggaagggcgttagataaggcactctgggctgtcaggagactgcctactgggtgggtcaacttatttcccactatgacatttatatctttatttttcacaattatattgaaggcagtgggagaggggagagggtgggttttacctgatattaaggggtggcaccccttccccaggcctgatgcaggtccatctagacagctcagattagcctaggccatgccctagggacacggcctaggggagctgggctggagggggtctgcctgggtaaggggatctggcttggccctgagctgcttagggacaggtgagtccttgggggcatggcacagagctggtcctgtattctccagggtccggagctggccaggggcggggaggaggaggatggcttctcctgggagaaggtgggctggcctttcttggcaagcggtcctctggcccctggggagtggggtgggtgaggctgtgccttgtagggggagaggggagggggctttgtgtgcaccattctgtaaaacacactcaagattctaagactattaaagaggatttataacagtctagtctggaatggtagggatgctgcttcctggggcaggggaggacccagggcagagggtgtgagcagagtggctgggtctgctggagactgctggacccctcactgctctgccctccccgcaggcatctgcttctgcagcctgaaccttaggaccgtgatgggccaggctctgatgggcctgcctgcatgccggggtgcctggagtttgatttggtgctaagagaggtatagattgtacctctcaattcctgcttctgaaactagggtatgggtgcccccagaagctgcacaaaagtgggctggtgatgggggacagggaagccacaggataaacttggcatcgctttctagagcatccgtttctgcaaagatttgtggaaggaaacattttcatactaaagaaatgtgatggagtaagatgtgcagaattcaggggactttttaagatgaaatgtgagactttgggaggctgaggcaggtggatcacttgaggtcaggagttcgagtccaacctggccaacatggtgaaaccccatctctccaaaaaatacagaaattagccgagtgtggtggtgcacgcctgtaatgccagctactcaggaggctgagaaaggagaattgcttgaacccgggggatggaggttgcagtgagccaagattgtgccactgcacttcagcctgggcaacagagcgagaatctgtcaaaaaagaagaaaggaagaaaaagaaaacgacagagagagagagagaaaaagaaaaagaagcttgctcttacttgtgcacggctctgacgactgagccccagcatgccccttgcccggcgtcatgaagtccagagggcacttgccccaccttctctcatttctggagccagtggggaggggaactcttgcctccctgcagtggggccaggcggggcggcggctagagtggtgtttcagcagggaccaccaggcggcgctgcagcctcagcctaggagcccggcagagcccaaaggttccgtggttactcccagtttcgccaacgcggggcctgccagcgtcccactccagtggaagcacttgtgaaaatgcagattccaaggctcaaggattctggcgctgcagatctagggtggggacaaggaatctgcctatttgcacccctttgcgttgattccggaagattttcagacctggagtaatgtctgtcccaagccacgtgatgacctctcagcgaatgtggcagctgaggaggtgtcagcggtggggtcggctgtgggtccctctgtggccttggtcgcctccctctgggatgggggcaggagaggaaaatgtcgatggttccacctggcctgacttccctggccccccacagcttccaccctcaggaagggtagcagagagctgttgggtgtcttttcataaatgctttctcactgggagcaaggggacctgagtttgagtccagctgcatctccatcttcctgtgcgacacggggcctggcaggctgagggtgggctcaaagctgtttgcaaaatagaggactgagaaaacgtcagaagttagcgaaggggtgggctgcttcctctgacacgtccatcctgcccagagctcacagctggaaggggccagagccaggatttgaaccccacgtatctgacttcaaagaccatcctcctggctccactggctcctgcccttccagatttcccagaacagccccaggacgtgtgtagtgtgaggctctgaccctcgcttttgtgaaatctggtcactgtgagctctgagcctgctgggttcctcatttcaacctcctggggagcacccagtttcagcaacccacttactcccagcctgtgaggttttgggagggagggaacatagacccatgtctaacactcagaatcgtccctgcagccactaatctgtcccatgcccatctggggcttccacaccttccagctgccctccctgggccctctgtgggctgccatctctcctgccaagggccctgacaggcccaaaggactggcacatgggtaccatgtggaggagagtacaagggtgctccttggcagtgcccacccacagctccctggggcagccaggaagaatggctggagcaaagggttgctctttgggctcccgtgggaggttagagacagtgcctaggatgtgttcagggagctggactttggggggcactgattggcatggccactgaccaataggtatggaagtcaggcctgagctggaatgggatccttacgtatggattggcgggaggtgcaggagctctgagagattgagctgggggggaattttcaactggtgtggaaatatttctccattttattcataataactggtatggctggctgggtgagtactggtgaatggcagcctgatacatgtgcacatacatgcatgcactctctcacacgcacacactcgaggccctgaaggcccctgagggctcagtccattcccagctgggaggaaccctagctcttcttccctgagactaagccatgggtggcccgtagtgaacagggaaagccaagtgtcttcctgcctggccttcccgggcctacactgcagagccccctctgccgctgatcaccatcctgtctcctagcagagctgcctccagcctctgccccagatgatcttccaggtgagcaggtcccccaggctgagagcagccgggtggaggggcacactggtgacgctggagcatctagccaacaggcatctcctgggccagcgctcccatcgcctttctcccctgcagaaggacagagacccaggttgctacgctgcctcggggcaaatgtctggctgttctctggggtctttagaggctgtaggctaaggtttattcatttattcattcattcatcccatgaatacttaatggcacagactatttgtgaagcacagttctaggatcttaggaacacagcagtgaacacacacaaaccccctgcccacatggcacctgcattctgatgagtgtagagactcttgcacacaactgatgcaccaggacacacgtgcacacacagcacacgcatgcacacagcacaccctgccacacgtacacaggtacgtaccagcacacactgccgactgctgacagcacagtctgagccaagtgctgctgtgggatccctggggcccatccaaggccccttcctgtggaaggaagtagaatgaacagcgcgtcgaacaaacaggaaagtaggaggaagtgctcatcgcccctgccacagtgcaggaatcagccattgccctggcaatccccttcccaactgaaatcaaatagaatcagagcagctgccactggacgtgacaggctgtgcaacttcacctctcttagtcttatcgggaaaatggggactctcattcctcactcccagtgctgttgtgggagccaaatgcggtcacgtacacagtgagctcattccccaagcagcccattccaggactggccccagcttcaaggggaggtttcccatcctctgggggataccttccctgagtaggaatgaggcccacgggaggactttgggccttggtgcctccggggcagggatggctgattggcccaaggggctggggctggggcaggtaagacctgtactcagcctcttgcctagtgggaaggtgagcaggtaggagggccattagaggacatctgagctgtgagcaccccggcccccagctgtcccatctgacatcatttccccagcacctgccttctgagcaaggggaatgtcaggcccagagccaagtgcctctccccaagtgacctcagatgctttaagcagtagcccctgggataggagtgggcttcctgcaggatgctgggggcagaggggcggccagccagaacagctgggagtgcagaggggctgtgtggaggtggggagtggaaggagagagctggagagtctccagcagcctcttggaggactgagtgggcgggaagggatgttagtggcagctgataggagtggaggggtccatcctctgcccttgcatcacacacctgggtgagcccagcttggggcttccagggtgacaggggccctgtgatcccagcacccaatcctcttggtcctggttcatagaggactcaggcgcttggggtggtgtctgagttctttccatggggaagctgtcgaggaacccacttggtgggtcagtgggggtctggtaaaatggaaggagagaggcctgtattagtccattttcaccctgctgataaagacatacccaagactgggcaatttacaaaagaaagggttttaatggactcacagttccacgtagctggggaggcctcataataatggaagaaggcaaaacgcacgtctcacatggtggtagacaagagaagacagaatgagagccaagcaaaaggggttacccctcataaaaccatcagatctcctgtgacttattcactaccacaagaacagtgtgggagaaaccgccccatgattcacttatctcccactggatccctcccacaacacatgggaattatgggagtacaattcaagatgagatttgggtggggacacagagcccaaccatatcaaggcccttccccagaggggcaggctctaaacccaagggagcccacagaggggaggaacagagtgggagtaagaataatgctatgagcaggactgcagctgggggagctaggaagatgagcagggctgaccctttggggtgaggtaggactcgcagcaggcaaagagggagcagggcagcaagaggaaagtgcaggcagccactgcggagggcatggtggaccccagcagccatgggaccctgtctccttcccaatcatcatcatcgtcacagcagccaccaaggatttagtattaagctttaaccctgacaccccaacagtgtagacacacttgctccccccacccctttacagtgtggaaaccaaaacttggaaaagctaagctgtttgccatagccctgaccaactacacaatccaggagtcattcacattggattcacaaatccaccttcaggtccagagtcacagtgactgaagaaactggggttggcccctggggcctgtgactctgtgtgctttccaatagttctcaaggccaatgggaatgaagacccctggttcataaaaagaggagaggagtaggccttttctaaggaggcacaagtccactaaacccaacttttcctccatcaatctatgcaataaggatttatcaggcacccactctatgccaggcactgtggaaggaatcaggggtcaccaaggtaaacaagtttgtggagctgacagtccagttgtgggggaggcacagggaaaaaaacacaaaaacagcagaaaaagcgccccatgtcagggacagagaggacagcaaaggtgatcaaggccctgtctctacctgccaggaagtgcacaaggtaagacaagccggtccccaggctggctgttgtcccttgatgtcctcattgcccggggcactgtggaggctgccactccaccaggacatggaggaatgaatccagtcccatgggctgactggcccagagttcaagaggatgcacgggaaccaatcacagtgtgaatgcaaatgagaaccaggcaccccctacccacaaggggaactgatctgggcctcctgtctatgtggtcaggaaaaccttttccaagaggccaacggaaactatctgtagcttgtgatgatctaaaatgcctcgtcagggattgcttaatgagtttatttaacagacagctggggcagaggggttgtccaggtgggctgtgtgtatttccttcctctgaggactgagcagggcaaggactccatcctgcatcggtctatgggggatgcaggtcatcagacccccatgactccatgtgtgggatgcctgtgcctggtcccatatggagtctggtttccatctccttcagaaaaggaatgtgaaggtggcagcctggctgggactggggaatggagaatggagtgggaaagccacgtgggagagcaaccagctttcctgccagtgtcacagggcagagtgagcatctagggtgggagtcatggcactgggaattgagggacttggttctgtctcagatgtcccctaattagttgcatgtggtcattgtttgcaaaaatagtcacatgtattcccctccctgtatctatgctctctgcaacatgactatacagctagcacctctctgatggctggtcgtgtgaccttctttggctaatggaatgtgggggaaaacacagtgtgtcaattataatcctaagtctcaaggagttttgcacacttctccccacttcttctctctctctgcctcactctctcaaaacctgccactgcctcatgaagaagcccaaattagcctgctggagcatgagaggcaagtgggtcagtactccatcatcccagatgacagccaacttacccccagaagcagaaccaccaccctacctgcagccaacttcagacgcaagagaagaccagatgagccacctagctgagcccaacctaaatggctgacacacacacagaatcatgagctaaacaaatggtggttgtttcgggccctaaatttggggttagtttattacacagcaatagctaactgataggataggtaatcataatgacagctaccatttgctgaaggcctattggacaccaggcccagcactaagcacttgacatacattgcatgagtcccctgactcatttaatcctcacaatagccctgagagttggtatttggatgcacactttatagataagaaaacagaggctcagaggagacatgagtctggtctaaggttgctgaacagtaagagacagagatcagatgagaacctaaaatctgtcttcatgggctcggtgtctgaatctcccttccagaggagccttaatgtcagagagaatcagcatcacttgagagactgtaatgtattctgcacacgggagctgacatcattaagaatgttctcagccttccgtccccaagaattatgccctgtctcaccctgttcttctctcacccccagtcaatgcctctaattcccttgggcttctggagggaaagacaaaagacacagatgaagggataatttatttctttttgatcccacctgctatttaatcagtaaatatttacagagggcctgctatgtgctaatttcagagtgttctgtctttcatgacacattttctgggtccctatggtgtgttctcactcagcccatgtagcaccaacacaagggtcattgggattatccccactttacagccgaaaaaactctgaggttccagagaggtgaagtggccaccttgaggtcacttaactataagtgaccaaaacaagattcaactctaggtttggctgaattcagacagggtctcttcttgctctatcaccacagctgtggcttttttaaaaaagggattttgaaacttcccctgggctctgtgtctggcaggtagggggctggaatgtggagaggagaaaggctagtggggctgttggaaaatgtcctctgactctcagagctggctggctcctgggctgggcatggtgctcaggctcaagctctgggtaatgctgtgagctggccaaggaggtcgcatgtcctggagggaggagaaatagccacaggctccagcctgcttcgcttgtgtccgcagctgacagccacagccatcgctcatccccacccgcccctctgcttagctgctggacctctgccatcttccaccaccaggcactgggcactgggccctacccctccccggctgcactgtttacaaatgggaaattcagggagagtccacccaggctgtcttctcctcccagggccatcacgtctctggagttggggcttagccacaggtctctcaagggtcccagagcccacccctgacccagggttcctctttcagactggaagcaggcccccacccagatgtcctgaccagagtctagctgcatggagccctcaccggtgtgtgggagcaggaggatacagaggtgaaaggctgagaggcctgggggtcttttaggcactgagggaacccactatcctgcaatcacacatggttgccttcccctggggcaagttgggtgctggaaatatccctgccctggaggcccttactggctgagaaaccttagaccaatcacctgcctctctggacctccgtctcctcatcttgaaactgaacagaaatattctcagagccacataaccacacagacaccaatatgaatttattaagtgttcagcaatttgcacacatgatcttagctattcccacaataaccctaagacctgaattcttagcgaggttaagtaacttgcccagggtcagggtgagtgagtgaccacaaaaggtttggactcagcaaccctgactcccagtccaggggctcagcctcgtggctaccagcctcctttctcagggtgggtcatacccgcaaatgcacagacgccctgcccgattcatgggctgcaggtcaggtcatgctccacactggcttgcttgatgccctggatgaagttgctgacccctggggtctcctagtgccctaaactcctctgccatatctccatcatcaatgagctgtgctcctctggttcctggaacaatctcccttttttcttccacctaactccttctcctccctcagatctgccttcagggagctccccagaccatggccccaatgacagaggtggccttgccctcctgccgccctctctgtggggagggcctcccctgtgcaaatgcctggtccaagggttcaaatccagactctgccctctcttttagtccctcctctgggaaatgagcataataatggtcccaaccacatagggttgtttccaggactaagtgatttagcacaggttcaggcttagaaaagctgtcaggtttttaaaagatgtctggagtttaggcagtcagcatggcccagcgtgtaacacaccgttgtaggctttcctatgatacagcctctaacaaaattcggtgtcctgagtccctggcaatagaattgtttacttttatgccaagatggtctggaaggcactgaaatctgcatgtggtgtgtgcccaggcagaatccgcagttcttatgaggttgtctaaaatgaaaacacacatcagcaaggcccatggtggtcccgcacgtgctgaatgtgtctgggaaaggagtcgatgtgctttccttatggtggagcaggaaattgttgggaaagtgttgaaggcacaacaagcacagcgtgtttagttcagaaagctaaagaaaaacaaaatgaagcctttttgagtaattacaaaaaagaaagaaattctgtggatgtggagcaagctctccatgcccaatgggcattttccccccaaaaggcgctctcctgatagtcaatgatcattgctggttgaagtctgtgtcttctctgctgaaccctaagttcctcgagggcagggagggcttctggttcattccttgccctgtccccagcttggagcatgtgcctggcatataatgagcatttaatgcatatttgttggataaatgaatgaatgaatataacgggccccattgtcagtagcagaatgaaataatgggatgcagaagagaactcaggcaacattgagttcttttagagaggagtcccgtacttgtctgacctaataatcatctgtgccttctgctagaaatccagattctggggccccagccctggagattcttgttctttgggtcggggcgggggtgctctggaaatcagggctttttttttattttattttgagacagagtttcgctcttcttgcccagttcttgcccaggctggagggcaatggcaccatctcagctcaccacaacctccgccacaacctccaggttcaagcaattctcctgcctcagcctcttgagtagctaggattacaagcatgcaccaccacgcgaggctaattttgtatttttagtagagatggggtttctccatgttggtcaggctggtcttgaactcccgacctcaggtgatccgcccacctcggcctcccaaagtgctgggattacaggtgtaacccaccacacctggccggaaatctgggcttttaaaagtacctcggttgattcagatacacgggcagtttgagaagtgctggcttagagcaaagcttggagaggagaaaagtgaatatactgcttacatgtctcagagggttgggccggggttcctccagtctgagatagaagagagacctggcaggcttcctgaaggaggaggcatggaggcagtgtcgaggatgggtgccagtcttccagggaaggaagaggagaggtggaggggtgttgccaccagtggcccaaaaggatggggctccagcctccaacctcacaatgaccacctctagaagttggaggaaggtggctgcagccccagtgtgtgacaagggtcctatgaatcaggatgcccctgggggaaaggacaccctgagcatgatgtcctctgtccactctgcttaggaggaaatggggggcagcactttctaaaggaggcccagtcaggacaaaacctcaggcctgggattagcccagtgggccttgcctggaggtggcaccttacgctctggaaggagagctgccccagcctagaagggctgggggaaggagaagaaagaggggtcgatgatggtcagcagcatctgccatttctatcatgatccagaggaggggtggccagtctggagtcgcatggcaggtattaggactagaactcagtgaggccatttggaacatacaatgcccatctcactgcctcccacctcctgagcacaggcgggccattttcctgttttcggcccagcacaggcgcggggagagaaggcagcaagagggactttttttttttttttttttttttttgagacagagtttcactattgttgcccaggctggagtgcaatggcacgatctcggctcactgcaacctccacctcccaggttcaagcgattctcctgcctcagcctcccgagcagctgggattacaggcatgcaccaccatgccaagctaattttgtatttttagtagagacgaggtttctccatattgatcaagctggtcttgaactcccgacctcaggtgatctgcccgccttggcctcccaaagtgctaggattacaggcatgagccacttcgcctggccaagagggacattttattgttacatattgactatgaacttaggccttatgaagtccagcccccaggaaacctgttgtaaactggggtctttgtttatgtctgtgtgcgtgtgcatgtgtgcgtgtgtgtgtgtgtgtccacatatatgctgtgggggctcctgagtgtgtacagggatgttattgattctttactactgtatcctgagtgcctagctcagtgcctggcatgtaataggtgctcagcaaatgaatgggtgagttccagcgtgcccatatatgtgttgtcagatgaaactcagatctgtaggacccagggagcctccccagagctccggagagggcagcacttccacaaccttagagttcaggctattttgggagacaggaaggatttgcaatcaggagaccgagagccaccctggacagccaaaggtgagccacattcgccaggccctggaggagagagaaggcaggggacacagcaagtgccaaggctgagaggtgtgagatgggcaaatccagagcaaaagggcacactggggttagactgcaagagtcagcaaagacgccaagatacagcttgagccgctgagtatgctgaagcctgtatttcctgggcttggggaccctggggaaggaatgcagctggggggaaatgaggggtcctatcatggaataagagccatggtggaagcttgggccgagaacaggctaatggcccgactgttgagggtatcagaagctcaagtgactagagagaaggagacgtttggtcaaaaggatttctttggagggagatctggggatgcttagatttccagcccctatgaggggctgttttggaaatgcctgcccctctcatggcttggttagagcgtcccagtggattatgagaagatggtaacgtgtgtctccagtgagttggggatgcagaagcctagacaaagttggctcccaccaggaaaatctaaaaaggccagcaaggggctgctatctgctaggaataaacagaagatagatctgaggtgggattggctgggattccccagagttcaacagagtgcagaaaacaagtatattttctggggttcaaacatgggcctggtctgccaagaactttgacaaaacacagctcttcctcctcctcctcttcagaattatgtggacaagtaaatctgggaagggctacagcagagcatgagtgtggggtgggcatggaaagccagggttagagcgggcagcagccacctacaggatgcccctggcccacggtgtgggaagtgcagccaaagcctcccgggacaggaaggaggcgtccagaagaatccacagagtcagccctgccccctgccgggccctgtgagcagaagccatcccacaacaggaccggtgagacaaaacctttccttcccgactcctctcccttctgggctatgccctggcagccccggaactgcaaatacagagtgagtgtcccttatccaaaatgtctggaccagaagtgttttagatttgggatatatatatatatatatattttagacagagtttcactattgttgcccaggctggcgtgcagcggcacattctcaactcactgcaacctccacctcccaggttcaagtgattctccagcctcagcctcccaagtagctgggattacaggcatacgccatcacgctcggctaatttttgtgttttttagtaaagatggggtttcaccatgttggccaggctgatctcgaactcctagcctcaagtgatccacccacctcagcttcccgaagtgctgggattacaggcattagccgccgtgcccggacaagatctgggatatttttggatttgggaatatttacagatacatgataggatatcttgggaatgggacccaagccttaaacacaaaatttatttatgtttcatatgcatcttccacacatagtctggaggtaatttctacactatttgaaataactttgtgcatgaaaccaagtttgtgcatattgaaccatcagaaagcagaggttaggtggaatattctacactcgtagtgtcatgccatgggtactcaaaaagttttgaattttggagcatttcagattttgaatttttgaattaggggtgctcagtctgtagcaacatgcgggaagaggggcatggagcaagggcatgtgcaggggcaaagtaggtccaagccccttctccagcttgctgcctgcagagggcagcaagggcagaaagaagggttagctttgaaccaagttcaaagatgcagttactacctcggaccagacacttttaatgccaacctgactctgtatttgcaatttaaagtgacctaagaatttttatcacctaaccgggggcagaaaacttgtggggctgcccgagttttcatccaggaatggggggatgaacttccaccggagaaggaatcataaaaagtaaaaaaaaataaaaaataaaaatgttgggtgacaagaataaagctgttttccctttcgcctgattttgcttatctaatgcactggtttctgtcattacggctgtgactctgtctcccctactagaatgtgggctcctgagggcgggtccctgtcagatttggctgtgtccctccagcatctggcccaaggctgggtatttgataaacctcagtagatgctaattttctctcttctttcgcttgaccctgggtgtttataagaggtggcatcaggttcagagggtagcccagggtctcacggatgtggacagagatttggcccatccttcatggctcctccaagcatcagtcatgtaaatcagtcaggcagtccatctgccagtgacgggactcaacggtcaggcggtcagacagttgggcattgatcaggggatggctggccgccagccttgccagtcagatggacagacagtccgaggatcactctgcactcaatctgatacagacaccgctttgcagggtcccctcccagcacaccaagagtgtctctcctctcccagagtcccccccttcccaggaggcctggtctggggtgctcctggcagggtgcccgtccctgatcaccgacttggcagcctcctggatgctggctccagcgatgcccctcctccttcccctccctcccaaggtgggagcttcaggctctgccaaagcattactaagcccggcggtgacgtcaccctccctggtcccaccccgcccccggccggcttacccttcacccctggctgcccctgtgagaatgacacatcctgggtgggggaggggctgtgccctgggaccaacatgaagatcctccccccaccccaggcttcctggtgggtgggatctggtctgatgcttccccagctggaggctgctcagctcgagcagttatagtcctggagacccagccagacgtaccccaatgcacactgaggctcttcccctcaccagcagggtggccctggacaagggactttatctctttcagcttcatctcggatgataataggacctgcctccgggggcgagtgagcgggtgtgaggcttcaaagacaccatgcaccgcaagcccctgctccacttacaaggggaccttcagtccatctcggttgcctgtggggtgttcactccgaattcctcaaggtccatttcaaaactaaatggctggtcctttgctgtcagggttagctgaaagacaaggacttttcaccaatgctgtcaagctgtgaggtcaacacccatttcctgggatcacagcagccatcccgcggtgtggggggccacgtgggagtgggccttggaccttgctgcccgtggaaattctaagcactcctcctcactttgattgcagcgatttttcctcctcattgtggccaaaggcgcaatcccaactcccagcactggctcttctctcttcttcccaaataaatacctgaatggaggttttattcaggaacaaccttgaaatacaaccaggccatcaatctctatcccccagcacctggggtctggagccccagaattcagaatgctgaaggttggttggcttggcattgggaggaggaaagccttcctcccattcctccagggagatcagaaggcagcagggtctgctgtaatctgccctgcccaagatctctgtctgatctctggaagatcacctgggctgccccagcaggtgccaatgaaccaacacttcaagggtgtccctcagaacattagtcttgccaggtgcttcacaaaacccacacctacacacatcaccaccaccaaaaatcacataatagtagtaagagttatgtggcttgctcaaggtggagggtctataagagaattcctcatgaaattgggatcttacagaactcaattcctagtgtaagggtaaagaataaataactccagccgggtgtggtggctcacacctgtaatcccagcactttgggaggctgaggtgggtggatcacctgaagtcaggagttcgagaccagcctgatcaacatagtgaaaccccgtctctaataaatatacaaaaaaaaaaaattagctgggtgtggtggtggtacacgcctgtaattccagctattcgggaggctgaggcaggagaattgcttgagcccgggaggtggagtttgcagagagtcgagatcaagccattgcactccagcctgggtgacaagagcgaaacaccacctaaaaaaaaaaaaaaaaaaaagcataagtaactccactgcacagaggggaagcaaggaaatgtatccatcttaagcatgacatcctgtggaagaggaaaaatgtctacaatgagaatgcagaagcataagccagccctgatgtgcctttgcacctgaattggtgctacctatgtgcatcagtaaacttccagtagagatttcagtttcatgtagtcccaggttggtaatgctcaaacatgatgtgcaggatcaaatataaactctctctggagggatgtaattgtaaagactcctacagataatgttccaggaaataagaggtctcaatagaaaaattataaaacacacaaagaaatgaaataccaggaatgagagtcagcataaacaacagacaggagaatcagaccagaaaagacgtgtgacattgaaattggatgcaaaatataggatgtttcaaaaataagagaagcttgaaaatatgaacaagtaaccagagcttgtacaacaaaatggatttggaaattaatcaaatgaaacttttatttatttatttttttcagatggagtttcgcttttgttgtccaggctggagtgcaatggccctatcttggctcactgcaacctctgcctccagggctcaaatgattctccagcctcagcctcctgagtagctgggattacaggcgcctgccaccaggcctggctaattttttgtatttttagcagagatggcgtttcaccatgttggccaggctagtctcgaattcctgaccgcaggtgatccacctgcctcagcctcccaaagtgctgggattacaggcatgagccatcacaccctgccaaatgaaacttctagaactgggaaatacagtcattgaaatggcagaattcaaagtatgtatggtcaaataagagtacatacctgtggagacagaattagtaaaatataaggcgaaactgcagaaattatcctgaatatagttcaaagtgaaaaagagttggaaagtagaaaagaaaagtaaaagatgtggaggatagagatctgacatgttcagtcagaatactagaaagagaagagggaaagtatggggaagaggcaatatttgaagagatggtaactgacagtttttaagaattgtcaaaagacatccaaccttagacccagaaaactcagtaatttctaaacactaaaaataaaaggaaatccaccactatacacgttaaagtgaagcagcagaattaagaaagagaggttgtcatccataagtgaactctaaaaaagttgatctcatagaagtagagtagaatagtggttattagaggctggggagggtagggaggagggatgaatgagaagagattggtcaatgggtacaaagttacagttaggagaagtaagttctagtgttctgttgcacaatagggtgactatagttaacaataacgtattgtatatttcaaaatagctagaagagaggattttgaatgttctcaccacaaagaaatgataaatggtgatggatttgttaattaccctgatttgatcatcacacaatgtttacatgtatcacaacatcacattgttctccataaatatgtacacttattatatgtcaattaaagagaaattatactttaaagaaaaagatcataaaagcagccagctggaccccccccaaaaaaaaaaaaccacacatgaaacagcctttagacaggtggctgacttctcagcagcaacaattcaattcagaagacagtagaataatatttttagtgtattttaaatttatattgctgaaataaaatagttgttgacctagaattctgtatctggtgaatccacatttcaagaacaaagatgtaatataactgggaggggccgggcatggtggctcatgcctgtaattccagcacttccggaggcagaggcgggcggattgcttgagctcaggagtttgataccagcccaagcaacatgatgagaccccccccgccgtctctacaaaaaaatacaaaaattatctgggtgtggtggctcatgcctgtagtccctgctacttgagacactgaggtggggaaatcatcactgcgctccagcctgagtgacagattgagaccctgtctcaaaagggaaaaaaaaagaaaacactgagtttaccacaatggacctcactaaaggatagtctaaagaatattcttcctaaggtcaagaacagataaggatgtctgctatcaccaattctatttaacattgtactggagattgtagccaggaaattaggcaagaaaaaaattaaagaagtaaaactatctttatttgcagatgatatgttcctctctatagaaaatggtaaagaatcaactaaagaactattagactaataaacaaatttagcaaggttgctggatacacaatcaatgtatacagataattgtatttctatacattagcaacatataatctgagaaaaatggatttaagaaaaacatttccacttacaatagcattaaaaataattttaaaaactaaagaatacatttaacaaaagaagagcaacacttgcacccttaaaactgtaaaatatgattgaaataaattaaaggaaacctaaataaatggaaagattgcttctgttcatggactggaaaatttaatattattaagatggaaatgcaccccaaattgatttacagattcagtgccacccctatcaaaatcccagctggctgttttacagaaattgatgagctgatcctaaaatttatatggaaatataaaggaccaagaatagataaaacagacttgaaaaagaacaaagttggaggactcacacttcctgattttaaaacttactacaaagctgaagtaattaagactgtagtcctggcaaaaagattgacatagggatcaatggaagagaattgagaatccagaaataaaatcatacattatgaaaaagggtggatgccaagacaattcaatgggaaaacatattcttttcaacaaatggcactagaacaactggatatccatatgcaaaaggatgaagttggattctttccttacaccatgcactaaaattaacttacaatggatcataaacctaaatgaaagagctaaaactataaaactcttataacaaaacttaggaacataggtttaaacttagtgacctaggattacgcaaaaccttcttagacatgatgtcaaaagcacaggcaacaaaagaaaaaaatagataaattggactttatttaaggttaaagcattgtgctttaaaagatatcatgaagaaagtgaaaagacaaatatagaatgggagaatatatgtggagatcatatatctgataaaggactagtacccagaatatataaggaactcttacaactcaatattaaaaggacaaataataatctatttgaaaaataggcaaaggacttgaatagacatttctccaaagaatatat

SEQ ID NO: 5679 - DNA, 182919 bp, Homo sapiens
  ATM gene - 107599053 - 107741971 of chr11; NCBI Entrez Gene ID: 472; Build 35; sequence includes 20,000 bases upstream of initiation codon and 20,000 bases downstream of termination codon of the gene
ttcccatagccctactacatgtcagaaacaccccttcaaagctgggtttaattccctttgaaatgatgtacagacgaccttttctcaccaatgatttcttgctagaccaagaaacctctgattagattacatgtataacatctttggcccatttccaataggaactgaaacaactgtcagaggcccaattctgtgaactagggccatctctattcaacccaggggacatagtactgggtaaaggcacttcctaccctctctccctctctaggtcggcactgggagtgaccttataccatacttctttctactcctatggcagtaaatgtcactggaaaatattcttagattcatcatactcgagtaaaggcctgggaaaactgacggaattatctctgttgacctgtaacagtacccgaagtaccagtgtgaaaaaatcagagacctcaagctaaatgacaaaaggttaagtgtcattaacctaccatgaacatcctctttatagtctctcctaggcttgctcttctcacccttgttctgttcctcacaaggcatctttgccaaggaccccttaatcctgaacccccaagggattatatactcccctaaacagttatttttcttctaaagtttaactgtccccatacaagatttaatttctttcactagggtgaaacagctctagccataacattgtttcagcatgtttagtctattttgctccttatttctgttatctttgggactacatttttcccttctagctcctctttgtataatacacatatttggtccatgtatatttaacctccttgtaaaatttgtttcttctcaattagagatcattaaactccatatggtcatgcaaatggagcctcagacgatggctcccttttactgggaactcttaggcctctgagagagatcagactgctgtttttgcaaaacagcaccccgtcagcagaaagcagcaattgtggtcattgtccttatcctaatggcagttagatgtacttcttcagagggaggattgatagcagcaagagacaaattcccaggcagacaggggtgggtccatggtgaaacccaacattcaagtcaaaggtggcctgaagcctgaaaactgcatgccagttccggacagagtccacaactagaatgaaaacttcctcgatgcctaaggccaatccaatgcccgcccacagaccactcaacatgcactcccacattctgagcccataaaaaccctggactcagcaacacgtggggttacctacctttgggacccctatcacacagagggttatccactttgggtaccctctcatgttgagagctgttctgttgctcaataaaaatccttttccaccttgctcagtctctcatgtccatgtaatctcattcttctcagatgcgggacaaaaccctggaacctgccgaacctgccgaacctgcagaacctgccggtgggaaaggggctataacattgtagccctcctgccttctgccaggagcggacagccgccccacatgacaggaagcagtggcagggccaagcaggcccaggagccgcaagccagagtggggcagtgggcctgaatgagctgttaacacaaatgagctgaaacacatccccctatcattcgctgccttgtggatggcacgaaggagacagagttgtaacagtcctttgatctgaggaatggaaacaaatccagaatgatgaaaagtgaacagagtctcagagacctaagggatgccatcaattttaccaacaaaagcataatggaaatcctagaacgacagaaatgccagaaagaatatttgaagaaataatgtctagaaacgtgcaaatttgagaaaaaacttaatctacacatgaaggtagctcaacagtctctaagtaggataaactaaaagagatccatacctagacagaccataatcaaactgaaaatacaaagacaaacaaaatcgtgaaagcagtgagaaacaactcatcacatacaagggtttctcagtaagactgacagctgatttctcaccagaaaccagaagtagtgagatgatattcaaagacttgatatttactttgattgttgaagaaaaaagataaaaaactgatagcaaaaaaaggtcaaccaagaattttcttttctttttgagacagcgtttcactctgttgcccaggctgaagagcagaggaaccattatagctcactgtagctttgaatgctggggctcaatcgatcctcccacctcagtctcccaggtagctgggatgacaggaactcacaactatgcctggctaattaaatgaaaaaatttttaatagagatggtgtctcactatatgttgcctagataggtcttgaactcctagcctcaagcgatcctcccaccttggcccccacaaagtgctgggattacaggagtaagccaccacagccagcctcaaggaagaattctatatctaacaagactccaaactaaaactttaaaaattgtatgttatcaaataaacaactaaaagaattagttgctagcagattttccctgtaagaaatactaaagggggactccttcaggctaaaatgagatgatactggagagtaacttgataacaacataatataaagcagtataggttaggtgcagtggctcatgcctgtaatcccagcactttgagaggtttagacgggtggatcacttgaggccaggagtttgagaccaacctggccaacacagcaaaaccccatctctactaaaaatacaaaaaaattagctaggtgtggtgggactcgcctgtaatctcagctacttgggaagctgagacatgagaatctcttgaactggggaggcagaggctgcagtgaggcgagatcatgccaaggcattccagcctgggtgacagagcgagaccctgtctcaaaaatacataaataaataaataaaaataaaatagtataagtgtttgttgtacgtaaactttcttccccaactctgcttaaaaagataactgtacacaacaatatgggcatataatgtatgaaggtgtaatttatatgaccttaaaaacatgatccaactatatgctgttgtcacaggatccttagggtgtcgcttttccagttcgaaacctctgtggctggtggtgcctttgcctgagttttgctagggcctgctgggtttgttccgcccacttggccaagcaggctgtgtttggctcatgctactgggcctaatcccatgcctgctggtggtgagccaggcatgaagcagtgaggggtgtatgagtgagctcagccaccgagcatagtcaggcatgttggatgcagtagggcgggcatatccaggcactggctccctgtgaggttgcatctggatcagacataccacagtggcttccactgtgggtactggggaacgtagtggcaccctgaagcttggagacatcaagaatcccagagccccaaagagggtgtcacaaccctggtttggggagctcttaggtctgggctccccaaagggcctcagctcttctttccttctcattgtctgcaacgtggtgagcaagggggcatgtttcagccctgttttacagatctttcagtcccgcctttcagtgggtcccatgttattatcctgcgtccaggaagaatgaggttcacggtcaactggaaggtgctcaaggcggagaggagcttcactgagtgacagaacagccctcaggagacctgcagtgggtagctcctttccgtaggcaggtcgtccccacgagtatccagctctcagtggagaggatacccacagtgggaagctcctttctgcagtgcctttctgtgcaggcaggtcatcctgatgagtgtccagctctcaacagagaggagacccacagtgggtagctcctttctgcaggcaagtcatcctgacgagtgtccaactctcagtgaatagagctgcagtgggtagctcctttctgcaggcaggttgtcccaacaagtgaccagttctcggtggagatgagacccacagtgagtagctccttctcacagctggtagtcccaacatctctgtgagtctggctgagtctggggtttttatggacctcaaatgggagtaagtatgtgctgatgggtccatggacagccatgggtgggtgcagaaaaagcaccataaattctcactctgggccatggatctgcagtctggcccccaggctttagctgtctctggcttgaaggtgtggcttcaccaggggcctgcccctttccacctaggagaccatctgcctcctgccaccatcaacctgacatccaaggtgcccacggtgcttaggctgttcatgccaaggggcaggcccatgccgagttgccctcagcctcacccttggcctccctcatgtgctcatcagagctcaaagtccagagggggaccgaggcagcatgaggctggtgtgttggtgctgcccctagtgtgcacacacccagccaggtcccgacagcagcaggctcagcctcaactttactttgaaatcggagtgggcaccgggagcagggagaggccaggcagcgggagtaggcgcttccaagcctgcagggaaaggggggcttccctggcccccgagagtgcagggatgcctgctccacagctgcagctgcacctgggagggcagggctcctgcccatccaacttggaaggggacagggcacccatctgttcccagctcctgctgccctgtggagcacacagccctggccacacctcccgtgctgcagccggcgtcttggcaccaggtgctggactgattcaaagacacaaacagggtgaaagtaaaaggataggaaagatgactggattacaccatccagtaatcaagtaagacttaaagttgttatgttaatacaggttgagtatatcccttatctgaaatgcttgggaccagaagtgtttcagattgttctccctttcagattttggaacatttgcattatacttactggttgagcatcgctaatctgaaaatctgaaatgctccaatgaacatttcctttgagggtcatgttggtatacaaacagttttggttttggagcattctgaatttttgcattagggatactcaacctgtctcaaagtaggtattaagacaaatattgttactagagacaaagataatgacaaaaaaggtcaatccacaaaaagataacatggctgggtgaagtagctcactttggggaggctgaggtggtagaatcgcttgagcctagggttcaagaccatcccgggaaacctagtgagaacccacctctatggtttttagaaattagctgggcttggtggtgtgcacctgtagttccagctgctctggaggtggaggtgggaggatagcttgagcccaggaggtcgaggctgcagcgaaccatgactgcaccactgcactcgagcctgggcaacagggtgagaccctgtctttaaaaaaaaaaaaagagagagagagaaataacacttataaacataaatacacctaactgagcccaaagtataaagcaaactcacagaagggaaaggagaaacagataattcaacaataaaagttgaaggcttctataccacactttcagtaatacatagaacaactaggcagaagatcaataaacaaacagaaaatttaaactgtaaagcaactagacctaccagatagctatagaacattccagtcaaaaacagcataatacacatttttctcaagtgtacatggaacattttccagggccgaccatatattaggacatgaaataagtgtcaataaatttatgagatgcaactaaagcagtgcacagtggaaaatttacagctataaacacctgtatttaaaaaagagatgccaggcatggtggctcacgcctgtaatcccagcacgttgggaggctgaggcaggcagatcacctgaggtcaagagtttgaggccagcctggccaacatggtaaactccgtctctactaacaatataaaaaattaactgggtatggtggcaggcgcctgtaatcccagatactcaggaggctgaggcaggagaactgcgtgatcctgagaggcggaggctgcagtgagccaagaccatgccactgcactccagcctgggtgacagggcaagactccatgtcaaaaataaataactaaataaaataaataaataaataaaaagataagccaagcatggtggcatatgcctataatcccacctatttggcaggctgaggcaggagagtaccatgaggtgaggaattcaagagcctgtgtctaaaaacatctctttaaattaggtaggtgtgctggcacgtgcctgtagtcccagtagttcaggagttcaaggctgtagtgaactatgatcgcgccactgcactctagcatgggcaacagactgagatcttgtctcaaaacaaacaaacaagtaaacaaaaaccttaaaatttaaaatcaattaccacattgggccaggcacggtggctcacgcctgtaatcccagcactttgggaggccaaggcaggcagatcacgaggtcaggagatcgagaccatcctggctaacatggtgaaacctcctttctactaaaaatacaaaaaattagctgggtgtggtggcagtcgcctgtagtcccagctcctcgggaggctgaggcaggagaatggcatgaacctgggaggcagagcttgcagtgagcggagatcatgccgctgcactccagcctggggaacagagtgagacttcatctcaaaaaaaaaaaaaaaaaaaaaaaaattcaataaccacatcatctaccttaagaaactagaaaaagagcaaagcagaaggaaataagcagagtatacataaatgaaacaaaaatagagaaaaatgaataaaaacaaaagctagttctctgaaaacgtcaacaatgttgacaattctgtagctagaccaaccgaaaaaaaaaagagaatactcaaattatactagatcagaaaagtaagaggggatattactatcaatattatagaaataaatgggaatgtaaaggaacagtatgaacagttgttatctcaacaatttagagaatctagatgaaatgagtaattcttagaaagaccctcatgtagtttagatgttgctcctgctaaatctcaccttgaattgtaatccccaatgttggaggtggggcctggtgggaggtgttttggccacaggggcagattcctcatgccctggtgctatccttgagatagtcagttctcacaagacctggtcatttaaaagtgtgtgacacctctttctctcttgctctcactcctgccatgtgagaggccagcttcccccttcaccttctgccatgattgttaagcttcccaaggcctccagaaggcaagcagatgccagcaccatgcttcctgcaaaacctaaagaactgtgagccaattaaaacctcttttctttataagttacccactctcaggtgtttcttcatagaaacacaagaacagactaatagacccaaactatgagaactgactcaagaagaaacagaaaatctgaacagacctataacaagaaatggaatttgtaataaagaaacctctcacgaggaaaagcccaactgggatcaaatgccctcactggtgaattctacaaaacattgaatgaaacaccaatcctttacaaactctttttgaaatagtaggagaggacttctcaacccattcttttagaccaatattgccctgataccaaaacaagagaaagacatcacaaaactacacgccaataatccttatgaaactggacatgggagccagggtcaatggctcatgcctataatcccagcattttgggaggccgaggtgggtggatcatgaggtcaggagattgagaccatcctggccaacatggtgaaaacccatctctactacaaatacaaaaattagctgcgcctggtggtgtgtgcctgtaatcccagctactcgggaggctgggacagaatcgcttgaaccagggagtcagaggttgcagtgagccgagatcgcgccactgcattccagcttggcaacagagtgagacaccgtctaaaaaaaaaaagaaaagaaacaaagtgaacataaaagtcctcaacagggtgggcacagtggctcacgcctgtaatcccagcactgtgggaggccgaggcaggaggattgcttgagctcaggagttccagaccagcctgggcataatggcaaaaatgccatctctacaaaaaatacaaaagttagctggacatggtggtgtgcacctgtggtcccagctacttgggaggctgaaatgagaggatcacttgagcctgggaagtcaaggctgcagtgagccatgattgggccactgcactccagaataggtgacagagtgagaccctgtcttcaggaaaaaaaaaaaaaaaaatccttaacaaaatactagcaaatcaagtccagcaacatataaaaacagtgatgcaccatgaccaagtgggatttaatgcagtaatgcaaggttggttgaataaaaataaatcagtgtaatatactatatccctaacgtaaaagacgaaagtcacattatcatggaaaaagaactgaacaaaatccaaccaatctgggcaatatagtgagacccccatctctgcaaaaaattaaaaatttagctgggtatggtggcatgtgcctatagttccagttacttgggagggtgaggtagaaggatagttttagtctgggaggctgaggctgcagtgggccataatcatgccactgcagtccagcctggatgacagagtaagaacctgtttcaaaagcaaaacaaaacaaaacaaaactctaccaaagaaaccaaaaaaaacaaaatccaacaccctttcatgataaaaacactagaaataaaaagaaatttcctcaacctcatagagttatctattaaaaaaaaaaaaagccaagtaacatcatcttcaatggtttaaaattcaaacctttccccataagatcagggaaaaggtaagaaggtctgttcttgtcatttctattcaacattgcatgtatcctctagccagggcaattaggaaaaaacttgaaataaaaagcatccaggccgggtgcagtggctcacacctgtaatcccagcactttgggaggccgagctgggcggatcatttgaggtcaggagttccagaccagcctgctcaacatggtgaaaccccgtctctactaaaaatacaaaaattagccaggtgtggtggtgcatgcctgtaatgccaactactcaggaggcagaggcaggagaattgcttgaatccgggaggtggaggttgcagtgagctgagatagggccactgcactctagcctgggcaacagagagagactccgtctcaaaagaaaaaaaaaaaaagcatccagattggaaaggaaaaaatcaagattacccctatttgcagatgacatgtcttatatagaaaatcctaaggaagccataaaaaacaacaacaacaacaacaaaaaaactattagaggccaggcaccacggctcatacctataatcccagcactctgggaggccaaggcaggcagattgcctgaggtcaggagttcgagaccagtctggccaacatggtgaaaccccgtctctactaaaaatacaaaaaaatgagccaggcatggtggtgtccaccttaatcccagctgctagggaggctgaggcaggggaatcacttgaaccagggaggtggaggttgcaatgagccgagatggtgccattgcactccagcctgggcaacagagcaagactctgtctcaaaaaaaaaaaaaaaaaaaaaaaaaaaggagttaagaaacctccctgggcggggcatggtggctcatgcctataatccagcactttgggaggccaaggccagcaaatcacctgaggtcgggagttcgagaccagcctgaccaacatggagaaaccctggtgctactaaaaatacaaagttagctgggcaaggtgatgcatgcctgtaatcccagctattccagaggctgaggcaggagaatcgcttgaacccgggaggcagaggttgtggtgagccaagattgcgccattgcactccagcctgggcaacaagagcgaaactctgtcccaaaaacaaaacgaaacaaaacaaaaactattagagctaataaatgacttcgacaaggttgcaggatacacagtgaatatataaaagtcaataaatctcaatgaactaccaaaaattaagaatgcaatgctagttacaatagcatcaaaagaaataaaatacttaggaataagtttaacaaaagtaaaggacttgcatactaaaaactggaaaacgtcactggaggaaattaaagacctaaatccacgcaaagacatactgtgttcatggactgaaaggttcaatattgttaaaaactcaatactcccaaaattcaccgatacattcaacacaattcctatcataatctcaactgccttttgtgcagaaattgacaaacatcctaaaactcctaaggtaatacaagggggctggaatagccaaaataatcttgaaaatgaagaaaaagttgaagcacttacacttaccaatttcaaaacttactgtaaagctacagtaatccagacgatgtacgggcatgaggttagacacagaaattagtggaacaaaataaaaaatccagacctttcttatttatctagtcaactctgaagcatggaatccagacatttatggtcagtttattttttttcagagacagagtcttgctctgtcacccaggctgaagtagagtggctcaatcatagctcactataaccttgaactcctgggctgaagtgatcctcccacttcagccaacccagtagctaggactagaggcatgtaccaccaaataaatgcccagctaattacttacttattggtacagatggggtgtctcagtatgctgcccaggctggtctcgctcccctggcttcaagcaatcctcctgccttggcctcccaaagtgttgggattacagggtgagccattacagctggcctgcatttttcataacagtgtccattaatgaatggacaaacaaaatatggcatattcatataatgaaatattcagctataaaaaggaatgaagtactaatacctgctacaacatggaataaggctgaaaacattatgctatgtgaaagtcagacacaaaaagcgaaatattctatttcatttatgtgcaatgtccaggcaaggcacatgtatagatacagaaagtagatttgtggttggcagaggacggggcaagggggaattggaagtgacttaatagtataaggattctctttggagtgatggaaatattgaaattactggtgatatctgcacattatgaatccataaatatcctggattttcataccctgaaaaacaacgaagtttacattttgtagtatgtgcatcatatctcaataaaaaaatatgattccaattttttttttttttttttgagatggagtcccgctcttgtcacctgtgctggagtgcaatgatgcaatctcggctcactgcaacctctgcctcccaggttcaagcgattctcctgcctcagcctcccaagtagctgggattacagacgcctgccaccatgcctggctaatttttatatttttagtagagatggggttttgccatgttggccaggctggtctggaactcctgacctcaggtgatttgcccgcctcggcctcccaaagtgctgggattacacgcgtgagccactgcacccggcctatgatttcaaatttttaatgtgtcgtatgaggttctacttgctttgtaccctaatttcctcttcagcctatgttttaccattccatcgcttccagccaaactggtctttcagtcccacagatacacattgattatatttcaaggccattgtttattctatttcctttgcttgggcagctaatcttttcttaacctagctatcttcaactcattcttcacagtttagtataattactccctattccctactattaaatattcccttataggtattacttaatacttataagtattcccttatattttcctttgaagtacacttatctcagtgctggcataatagtcagtaagtatttgttagctactgaaattataagtgggagctaaaggatgagaacacacgggcacataaagggaacaacacacactggggcctattggaggtgaagggtgggaggaggtagaggatcaggaaaaataactaatgggttctaggcttaacacctgggtgatgaaataatacgtacaacaaacccctatgacacaagtttacctatataacaaacctgcacatgtacccctgaatttaaaagataaaaaaaagaaattatgtctaacgtctcttccaactttataacgttctactctcttcacctggaactgtatcgttaaccaggtccaacaggtgaaaaacctaataaggttgcctacaaagtcattatacactaaggttttaaaaaggaaagggcaaggatatggtcatctcgttacaggcaatgccctagctgtgatttgggaatcaactcaccactctctacttgttgatgaatctgttttccaacctcttgctaactaataagaagaaacaaacaaatatacaaatcaaaaaccaaaggcattgtgttttggagaaagcatttggatatctgaagaaagctttatctcagataacatgacttcaatcttcctatcattgaacatcaaaccacagatgtgaaattaattagatcaaagatacactgcaatgttttcttctctttttgtgaaaactagctggctgaaaagtaatttttatgatggctggctttccgaccgttataatatttggaataggtgagttagctgttactagctttttgtaaacacaaaaatttaaaacttctacagactattagaatcaccttaaaattaggacagttggagctttttcctcatatgcttcaagatttagattgaacacctcaaatatacttccttttcatggtggagtttcaagtacttatcaccctagatgccttcagtcacttggggacttctgatagacggtggtattaaaatctactatagatttgcagtagatttttatctatcttaaagtagatttgctttcccctagaccatgcattctcaaaaggagtcatactgccctaagaggctgaaaattggttctggggcagggaggaatgaagaaaatctccctctttttatgcataaatcacagatacacatgatatataaacatatacaatatattcatgacactaaaacattaaactttcgtgtggggaggagaggagggtcagggaaaaaaaaaaagcctaagaagattccttaaagttgtgtaatgaaataaaggttgagaaacaatgccccagacagaatacagtgatacacagtaaacctttttcagaaaaatattgtcatttgtgctagcataacctggaatcattacagataattcatggcatttcataaaacattatacctctgtatagcacacacatgagatggggctgttaaaagctagattacctctataataagtgtttaagttataatgtatctcaaaatagtaatatctaggatacattatcttctgctcttaacaacatgccccaactttggcaatcttgagttctcattttagattagatttgatgtattctggtttacttttgtcccaaaagttccaaaataatgtagtaaatagttgactactctcatgttcactgatcattatatagcaagtcctcgaataccatcattttgttcaatgtttttgttatactgctgatgagagaaaaaaatcaatttctggctgaggacactgtatgtgtggagtttacacattttccccatgcctgcatgggttttctccaggtacacgtttcttcccaaactccaaagatgtgcacgttgttaactggtgtgtctaaattattacagtgtgagcatgagtgagtgtacgtgggcgtgtgagtgctcccttcaacagaatgacatcctgcccagggttagttcctgccttgcaccctaagctgctgggataggctctagctacctgcaaccttgaactggactaactgggtaagtaattatcttgtttttattaatccatcttaaatgtatatatagcttacatgtatttcaatgtttaatattagaagtgttttggactttatttacaagtgtggtgatatttttgtgaccaaaaatatgctgaagaaattcttgtatatatcagttagcctatggtaaaattagtttgattatatatcattttgcttaaagttgcagttttcaagaacctattgaacctattaaattaggccttactatatatatatgattagtatctgcctacaaaatgtttatttatcatcattaagtatctgactataaccaattctcagtcaggtaacaggaaattttaggcacaaattaattctaaatctctggtgttagatgaatgaaaatccaaatatgatgaaaatactggctgggcacagtggctcatggctataatcccagcactttgggaggccgaggcgcatggatcacttgaggtcaggagttccagaacagcctggccaatatggtgaaacccagtctctactaaaaatacaaaaattagccgggcgtggtggtgagcgcctgtaatcccagctacttcagaggctgaggcaggagaatcacttgaacctgggaggcagaggttgcagtaagccaagatctcactgctgcacccagcctggatgacaagagtgcaattctgtctcaagaaataaataaataaaatagaaaatacaaactaggcactaatcatctcttatcagtataatacaaatcgttattctacaactaatattagttattactgttttttccttttattcctaaaaacaacttaagaataaaagaagtgtatttttttgtgtaaacttactgacaaaggtccccgaataggtaagaaagtatgcctgagtttccttcttaacataatattatcttcagcctacttttattataagtggaggtggtaatgagtaactaaatgaattgaaggggaaacaaccgaaaaagagaagaaaggataagatcctaactatatgaagggtattttttcttcctacttgtagagagggaaagataaaaagagaggtttaaagcaagcaagagatagtaaagcacgctatgtgaaaacatctccttcacatattttattatttcctagaaagattagtaatttaatgttcgttaagcatgcaaataattcttaggaagccgtaccttatgttgtcttatattactagatccacaaataacagggacaaggtttctgtctataaagttacaatttacttggagatagaagatatatacacaaataactgtaatgcaaagcaaaaatggtaagaaaatagagctgactcacttcatgggaagggaggggctggagaaaccactactaagcttggaaattatgtgatgtttgaaggtgcagatgagtactgaaggatggttgggaatcccaaagaagctgacagaaagtatatatgcaatcatatttggggaacatgtccagtttggatgcagcacaaggtttatgaagggtaacagttggagatacaacagaaaagacaaaatgggtaaggatcatgaaaagttttagacagcaatgagtacatatattattaaataaacaaaggagtgtcataatcagagccatacttttgcaaatgttttattaaatatctatgttttggtgatataaaggtgaatagaaccagcagctcttgacctgttaggggtgtgtcagttttggtcctgtttgacctcaaacacgttcttgacccttctgtcgctctctactgtatgacataaagcttgactctatataggcaatgttccccaagctcttctgtcggcctgctactggctgggctcagtaaataggaagcactggtgggaggctggagggcaggaggaagcagccatatttttcccccattccctttctgcctcagtagagtctcctctaagactaccactccctcatcagacaagtcttccacgttccgcagtcaaaccagcctcttgattgcttcctctctccttatccttctcattagcatagtggcttcctactgttgctaaccactgagatgccttagttgtaagctgctgggcgtcttagcttttctctcaccagtgtaaacgaattctctcattaaatctttccatgttaaatactcagaatggtttctactttttttactgcatgctgtctcatacagaaggtaacaaatctattcaagaaaaccttcacagatgatagttttggggactcccagaactcttgaagcttgtccattcatccatgactaagactactaataaaacaaaaaaccaagtaagtttcaaattgggaagatgaaaaagttccagaaactgatggtagtgatggttgcagaaaaatgtcaatatagttaacactactgatctgtacattaaaaacaaacaacaacaacaacaacaacaacaacaaactcattgttttgggctttaagaactatacatttttaagtgttgaattttgttagtatattttatcaaaaaaaagtaaacacacatctacaatgagacatgataaggttgtaacagaagtacaatgctatggcaacatttaagaagtactgactgtacttgctgaatgaagtttcagagatcaggcatgacctgaaccttgaatagaagtgtactaggaagacaaagagaagtagaatacatacaagaattttcaaagaaacttcaattcgtttggcatgtctgcagcataaaacagatgttaggaagttgagatcaagttggagaggtaggtaggatcagttccacagagcaccttgaataaatagataaaaactgaactgatggcccagaggcaacaaacactttgatgtattctggcccacacaacattttgtaaaatcccagcaaggcaataagggctacttaagtggagtagtgagatgcaaaagtcagagtgcagtatcctgaaggataaaaggtaggtgaagaacagcaactaagtggaattcattgttctttgaataaatttgacttgtgaaagggtgacacagaacataagacagaatgttctgtttaatgggtgtctaatgtctagtggggtccagaaaagtgtttttttgtgtgtatgtttaagaatttaaaaaaaacctaattatctgaacactaaggggagaaaacttaacttctctatgttcagcaattggcacagtgtttggaacatactaggcacccaaagatttgctagaaaaaaaacattatgaagggaccaataacaagaggagctgaagatggcgagggggtactgataggaaaagaatcatgagtaaataataaacctcatatgagaaagatatacacgatatgtatctatttaagatgtaaaatgataaacgacaaaagtaagagcattaggcatggggaggcttttttgtattgtatactcctgcccatctgaaatttttagtaagaatagaattatctcaactttcagactaaaaggtatagtgtgaaagcttcagggagatttgtaacaacagtaaataaaatgaattgcgaggacaactgtctgggaagccatgacagaagtccaaaagagaagtaatggcaggcacattgcgggattggtggcagtgaaaatggaatgtgaatgacaaagatttttaagataagaaaaccatggctggcgttttttgtccattaaatgaaaagcaggaagtcagcagagtagctggtttgtggagaaagaatactcacacatcgatgtgaattatttcaattagaaaatgatactgctttcttagggctttcttaactaggggtgattctgccctccaggggacatactagcaatatctagagacattttcactgatcacaactgggtaagggtagggtggggaacgggtgtcctactgtaatctagtgaatagaagccaggaatgctgctaaacatcctacaatgtttgagcacaggatagctccccacaataaagaattatgaggcccaaaatgttaacagtactgaggctgagaaaccatgtttaagactatagttaccgaaactcaactagattaccaaactgccaaaactcagaattcttaagcaaaagattaatcagacattaacaaaacattaaacttgtcattaagtttcttcaaaaatggatggtggaaccatttccgtttaacgtttcctgcaaaatgtgcttatcaagagccctgcgcaaataacatttttgtggacagcgctgggcatttaaaagaggcacaagacaaatgggttttccgaacaataaaataatagtagtaatggctgtgaatactatgggaggtttcatcacagatgcttgccatttacttttagggacgtcgcatacgacgtccgtaaattactggctcgggttttgagctttacctggctctcgtcccctgtagtacaatcctctttattctttcaggggacaaacaacaacaaaacccgtctctcacacagacaatacaccctgacagacaagtgacccacaaacaatccctcctcaaatgaaggtaaaactagggctagaaaacgttcaactaatttaaggcaattaaccctctgaaatttttcgctgatcaaaggaacaggaattgctgttttaaaatatgcaactggcatttcacacctctacactggacgacgtattgcgtggaggatggagaaggaagatcacccctactcccaaattcgtagttataagggcgggttattagaagggcgccaggaaggtctctctacaaagatggggggccggggaactccctatttgccctattttggtcccaacactgaaccaaggaaattgcgcccaaggttgaagcacacgcaatccgtccgtcatgcagacaaatgctctttcaggggtcctaattaagtgtggaggcctgactttccttccgaatccgccccaggtgttccaccccgagcttcccctcgggcttcccctcgccacgcagcctctgaagagaggagcatctacatacaaagaggcttaaactgcccagaacctccgaatgacgaagaatcaccgccagtctcaactcgtaagctgggaggcaaaaccccaaagcttccctaccaagggaaaacctttggcctcaaaggtccttctgtccagcatagccgggtccaataaccctccatcccgcgtccgcgcttacccaatacaagccgggctacgtccgagggtaacaacatgatcaaaaccacagcaggaaccacaataaggaacaagactcaggttaaagcaaacacagcgacagctcctgcgccgcatctcctggttccagtggcggcactgaactcgcggcaatttgtcccgcctctttcgcttcacggcagccaatcgcttccgccagagaaagaaaggcgccgaaatgaaacccgcctccgttcgccttcggaactgtcgtcacttccgtcctcagacttggaggggcggggatgaggagggcggggaggacgacgagggcgaagagggtgggtgagagccccggagcccgagccgaagggcgagccgcaaacgctaagtcgctggccattggtggacatggcgcaggcgcgtttgctccgacgggccgaatgttttggggcagtgttttgagcgcggagaccgcgtgatactggatgcgcatgggcataccgtgctctgcggctgcttggcgttgcttcttcctccagaagtgggcgctgggcagtcacgcagggtttgaaccggaagcgggagtaggtagctgcgtggctaacggagaaaagaagccgtggccgcgggaggaggcgagaggagtcgggatctgcgctgcagccaccgccgcggttgatactactttgaccttccgagtgcagtggtaggggcgcggaggcaacgcagcggcttctgcgctgggaaattcagtcgtgtgcgacccagtctgtcctctccccagaccgccaatctcatgcacccctccagagtggcccttgactcctccctctcctcactccatctttcctggcctctctccgggtgcttagcggacttggccaataacctcctccttttaaacgccctgaattgaaccctgcctcctgcgcatcctctttttgtgtcaccttagggttcagatttaactacgcgacttgactagtcatcttttgatctctctctcgtatttagtacttttagtcagcgagcatttattgatatttcaacttcagcctcgcggttaagagcttgggctctggaatcatacggctggaattggaattctgtcagtcgtgtggccgctctctactgtcttgtgaagataagtgagataatcttgacctgtggtgagcactcgtgagcgttagctgctgtatttaccaggtacagataagacaactacagtggatgataatgtatgtggtgataggggagtactctgatggtagaggagtgactttggttctctgcaaactcagcctgagactatcaattcagtttgtggtgagacctcgcagtgttaccttggcagatggtagaagccttccagatggaaggaaaaatgcgtgtaaaggcacaaagtgtagaaggaccctgaagctccagcgtgaggcctggcattgaatgaaatatattttgtgggttttcagctgctgaagtcataggaatggatgagaccaagaaaacaaagctgtttttgaggtatgagcggaagaagagatatcaggagactttcgaaacagtcataacggaagttaatatgatcattgctaacatttgctgtgtttcaggcactgtaagcatgtatatgggtccttaaagggactcatagaggtaggtactagtattgtttttccttttatcattgagaaactgaggtttgaagagattagtgaacttgctctagattatacagtttgtaagtggctgaaccaggatttgaactaatacaatctgactacagaggccacactccttagcactagaaaagaatggcatgccaagggcagagttatttctaggaagatgggatataagcgtcattgtcaagttgtgcaaaggggtcaacttggttgagatctaaaaaggaacactgaattcgtcaattcagaggctcgtaggaagtaggaaatccttatcttttcgtttgaaccttgagtggaacctagatattctggattaatgtataaatgaagttcatctttatatggtgacactcatactctagttgactacctaatagttcctctgccttctttcagttccgccaacatactgtgttctttaacattgtagaaccctttggctatgctagtctccttccctgaagtgttggtcctctagccctttttttgattggcaccagttagttcagatcttggctttattataaactcctctgagatatatgttccctgacagtttatctaaaatgattctctctacagttattttctattactgtgtttttgtttcctcagaggcatacatcacaatttggaattatgcattggtttatcaatttacttgtttattgtcaccctgctgcccagatatgacttcatgagggtaggatttgtatctgtttagttcattatttgtctagctataagtagtaaatattgtttgcatctatcagtgaatgagcatcttctgtttatgtagataatactgaactgttttgttttcttcaaagtaatcattaagctgaaggtaagaaaaacaagttcaaggaagtcacaccatggggaaaaaaaagtcaagtttagggctgcctcttccgggaagtgtcaaatctttagtatatttaggaataaaggtgccaaaccttatggttctttggatattgctaaggtattttcattggttagattaccagtttcattttccttattgactcaagagggctttaaactgagattgaagaagtaagaagattcctagataaaaccataaggaatggaaaaacaaaaatgataatacttgtccacaggaagtatataatcaaatgaaaagaactcaaataacaatctgtaatctatagcagagtaaagcggaagttgtaatagtgttgggggatgggggaagtcagaagaaccaccagtgaatataaaaggagaagagaatcagagccatctgctaataaaatgggtagtcagctctttttgttttttttgtcttgttttgttttgagacagtctcgctctgtcgcccatgctggagtgcaattgcgtgatctcagctaactgcactttccgcctcctgggttcaagtgagtctcctacctcagtctccccagtagctaggattgcaggcacatgctaccacacctggttaatttttgtatttttagtagagacggggtttcacgatgttggccaggctggctggtctcgaactcctgacctcgtggaacgcccacctcggcctcccagagtgctgggattacaggcatgagccaccacgcctagccccggtagtcagctcttactgagaatattcaaagacagggcattcattttgtaagagacattccttccttcataggaagattggacctggtcttttagttcctcccaattttgagattctgtgagattgaatcggggcagagaaacatacttaatcttgaaagattaagtagaatttagatggatggataggagaaggactttccctacctttttacttcttgagatatagttatttgtaggtataatatacataaatatatgtattttttctctgtttacagacattcatagtttaataaaaaacttctttgtattatataaaggtttagatcagaactagtaaaacagaatgctgtttctttttttttcttttctattttactttaggttctgtgggtagatgtgcgggtttgttacatgggtaaattgcatgttgctgaggcttggtgtacgaatgatcctgtcactcaggtagtgagcatagtacctgataggtagcccttcaagccatacctccctttctttccaaccctcaaacagtccccagtctctgttcttcccatctttgtgtccatgttgaaatgctgttcttactacatttttttgaaggacatcaaaagagagtttgattatatcagaagcccccaaaagaagagagctactcagtggaatcaaggcatagtaaaatatagttgatccttgatatttgcaaaggataccaccatagcatagaatttgcttcatttccttttaaaacagaaatgtcattttactcctattgttatgtgttaaataagaaccttaataccagttgagatggaagtggtagacaaagcttactagctctgataacctcctacttatcagctccaaagcatgttttaagcctttggctcagcaaaatgacatgtctctccatataagcaagagtgcttttttttttttctttgagacggagtcttgctctgtcaccaggctggagtgcagtggcgcgatctccgctcactgcaacctctgcctcctgggttcaagcgattctcctacctcagcctcctgagtagctgggactacaagagcacactaccacgcctggccaagagtgcttttaaatagttcattgtcaatgttaaatccttgagtgctcatttccttatttacctggctgttttctattcatctttcatgtctcaatttaaatgtcatgtttctttggtctcagagtaataaaaagtaaatatacttcccccatctcccgccccgcagagccttcctctgttgcccaggctggagtacagtggctcgatcttggctcactgaaagctctgcctcccagattcaagcgattctcctgcctcagcctcctgagtagctgggattacaggcgcgcgccaccaagcccggctaatttttgtatttttagtagagacagggtttcaccatgttggtcaggctggtcgaactcctgaccttgtgatcctcccaccttggcctcccaaagtgctgggattacaggcgtgagccactgcgtccagtgtaaattatacttttattttaatcctgctactactgcaagcaaggcaaacatttttgtgttacagcattacttgtatagattttaagaaaatctcattttaaatacggaaatgttaagaaaaattattgtgcctttgaccagaatgtgcctctaattgtacagttaaatctaactataaatactgcagtataaaataattatatacacattttttcacacctctttctctctatatatgcatatatacatatacatatatatacctatatgtattttttttacagacagtgatgtgtgttctgaaattgtgaaccatgagtctagtacttaatgatctgcttatctgctgccgtcaactagaacatgatagagctacagaacgaaaggtagtaaattacttaaattcaatttttccttgaaataagtgtgattagtaacccattattatttcctttttattttcagaaagaagttgagaaatttaagcgcctgattcgagatcctgaaacaattaaacatctagatcggcattcagattccaaacaaggaaaatatttgaattgggatgctgtttttaggtattctattcaaatttattttactgtctttatttttctctttcatatttatttctgttgtgatattacttttgtgtgtaagtcttaacatttatctttgcttcctatatatcattatgccttgcatatgaatttggcatttaatatttatccaaaacataatttttaaaggttgttcatatagaaacttaaaaattataaattatttcttcaataaaatgttttagacatatctcactcaaaattgagagagaatttctttcattttagttagttcacaagacttcagattagaggaaaaaattataataaatgttaggatattattttcacacctttaaatattactctgattataagtaaatgctgtgtgttaaattgtaataaaacaagtaaaaggaagattggaatacttgtgtatgaatttggttaaaaacaaaaaatacctcgaacaatgaaaaaacacaactgattgctggacaggagtggcaaacagggttgatgcatttttacattgagacatcattttcaaccgtgaaatccatttataactagaaacagattgtaaggattaggaaagatgaataaagtattttaaatactgagagtattaaataaactagaaataacatttgtagtcaagaggaagtgtgtatttagttgtccttcagtgtttatgacagattctgttttatttttagctcctgtttggtattagattgactgttacagatttgaaagcatataaaatgaaacatgcatgctgtttttcctctgattttctagtttattttaaataccacaaatataattacaacctgaagatgaatactattttgtataagctgatctggtaggtcaaatatgcacccagcattcctggctagttatgaatatcttctaggcaggcttaatttattggctggcaacattaccaactgcctaagaaacaggtagatcctgtacagaataacagaaggagttgagagaggattgagagggtccttactagcattgtaagcttttaatgacaaatttagaaaacaggcagtaaagcaatagaaagtcatagaagattaagagctttgcagaccagatattaaattggtcttgtaggagttaggccttgaaagagagatttaattgttttatttgtttttttcagctgatgtagtaatctaagcaaggtggtttaaaagttgctctttgtgatggcatgaacagcttttgaaattattataatttaagtattcaacgagtttctgaaattgcattttgttttcttgaagatttttacagaaatatattcagaaagaaacagaatgtctgagaatagcaaaaccaaatgtatcagcctcaacacaagcctccaggcagaaaaagatgcaggaaatcagtagtttggtcaaatacttcatcaaatgtgcaaacagaagtaagtgatgttataaattataaataaatggcttaacagattactgtcgcgtgagttttttttttttttcagatcattttaaggacttaactgttgcataagtttgttctaaatagaataagataaaagttgagtgtaagtacatataatgatttttatttttattaaaaggtttttttttagggctagtcaagtgaagcagtgggagtttagaaggaacaaagaaatctgtaactggttgtgatcaattcgttgtaaacaccactgcactcaggccagcctgatttttaatattacaagttcaaatatttggggaaatttatgcaagcatagaatgacagaaatctgaggattgaagggatttatttatttaagagatagggtgtcactctgtcacccaggctggagtgcaatggtgtgatgatagctcactgcaggctgaagcttctctgttcctaagtgatcctcctgtcttggcttcctagtagctaggactacagaagtgcatcaccatgccaggctgatttttttttttttttttaagaggtgttatttcactgttctgcccaggctgatcttgaactcctggcctcaagcagtcctccccctgctcagcctccctagttattggtattacagatgtgagccaccatgcccagtgaaggaattaaaaattactgtttaaactacccagtcttggatgccctctctacgtccctagcctttaggtagaagtgcagtcttcatgattgaatatactttcaaggctttcttttccatctttgaatagcattaacagtattaaaaactggccaggcgcagtggctcattcctgtaatcccagcactttgggaggccaaggcaggcagatcacctgaggtcaggagatcgagaccagcctgaccaacatggcaaaaccccgtctctactaaaaatacaaaaattaattgggcattgtggcgcacgcttgtaattccagctacttgggaggctgaggcactagaattgcttgaacccaggaggcagaggttgtggtgagctgagattacgccactacactccatcctgggcgacagagcgagactgtcaaaaaaagaaaagtattaaaaacctgtcttttgttactgcttctcccttctgagagtatatcaaaaactcctatttatgtttttagtgtgacatccttagagatgtttgaaagtagccacaatatttcctaagtcctcatctctaaagttcataatctcactttcttcagctcacgtgacctaggttttatgctactctcctctgaatattcttcactttaattgtctgtcttaaagtgtgggcctctacttacagggaagaggccagaaaaacaaacaaaaaagtgtgggactcattttttttaatacaggctcttgctctgtagcccaggctggagtgcatgcagtggtgcaatcttggctcactgcagcctccgcctcccaggctcaggtgatcctcctgcctcagcctcccaagtagctgggactataggcatgggccaccatgtctggctaatttttgtatttttaatagagacagggtttcactgtgttggccaggctagtctcaaactcctgacctcaagtgattttcccgccttggcctcctgaaatgctgggattacaagcgtgagccactgcacctggccaggactcaatcttttaggtatattctgattagtacagagtgaagcaattcttgcttatctttcattctgtactcttactgattaattctaagatcatgtgagcttccttggctgtcagaaccaacacttaactgacattttacttgctatgatttgaggaaaaaaacaacccccaaaaatatttttttctcctgatgagccaaatagttcccatctttaacttgtacaattaatattgtgaagagttgatttttcggaaccaaaatgcaggatcctggcaagcttttgtaaggaaatgggctttacacatactgaaaagctagaggcagaagtgtgtgttcagggactcctgggctcttcacagataaggatgttgctttgtgataccaactcttaatttaagaatcaggagtgtgaggcgcggttgctcacacctgtaatcccagcactttgggaagctgaggcgggcagatcacctgaggtcaggagttcgagaccagcctggccaatatagcgaaaccccatctctactaaaagtacaaaaaatagctgggtgtggtggcgggtgcctgtaatcccagcttctcgagaagctgaggcaggagaattgcttgaacctggaaggtggaggttgcagtgagctgagattgtgccattgcactccagcctgggcaacaagagtgaaactctgtctcaaaaaaaaaaaaaaaaaaaaaaagaatcaggaaagcccccaaattggtaaatatttagtagaagtatgcagattattagtgaatatttcagattggtggtatgagacttgagtccaaagaataatggtttagtcaattttctacctcctctgagatgcgagttcgtgtggatagcttcaaccccttgtcagagactccagcagagacaaaggaaaactacaccaaaatattctgcactcacttttgctctgtgtagtagctttgtatccagtaaaatattttatttgctaataatgctgggatatagtaggtacttactgaaagagtgaatgagagaaagataacatgtcaattttgtagcccaccagaaaagtttgcaatgtgtacagtagttttgccttgcagtgaacaaaccttttaattgcaacattaacaatggagattacgtttgaaaatgcatcagcctgttggtttataagaaatagttggtgaaattatcaatgctggtcatgtaagtagttgaaaatttgtttttttatttacggcttccttttctttcaaatttgactttgttacttaaacctttttaatattggggcaaaaccagggagttactattccctcaccccacttcagttgtttttgtttgtttgtttgtttgttttttacgaaaagattggagggttgatggaaatttaacatatgtctaaactttgccattcttgcttagcattggtatccaaggtatgatgaaagaaatagagattagtaaaaaagaagtaaaaggcagctgagaagaaacaagtaagcaaatattgttgatttctctccttttttttttttttttttttttttttttttgagacagagtcttgctttgttgcctaagctggagtgcagtggtgcagtcttggctcactgcagcctcttcttcctgggcgcaagcgattctcacgtgtcagcctctagagtagctgggactataggcacacgccgccaggcccggttaatttttgtatttttagtagagacgagggttttgccatgttggccaggctggtctcaaactcctggcctcaagtgatctgcctgcctctgccttccaatatgctgggattataggtgtgagccaccacactcacacacccagcctactgttcatttcttttctttttttttttttgagacagagttttgctcttgttgctcaggctagagtgcaatggcgccatcttggctcactgcaacctccgcctcccgggctcaagcgattctcccgcctcagcttcccaagtaactgggattacaggcatgccccaccatgcccagctaattttgtatttttagtagagacggggtttcaccacattggtcaggcttgtctcgaactcctgacctcaagtgatccacctgccttgtcatcccaaactgctgggtttataggcgtgagccactgtgcccaccctgttcatttctttatgttagcatttgtctgcttttgtacaaagcttaaatagagtctagatagtgcaaaactcagctgcgaaaaatgttaagttccataagattcctgaaagtctctgtaagtaggctgggcacagtggctcatgcctctctaatcctagtactttgtgaggccaaggcaggcagattgcttgagcacaggattttgagaccagcctgggtaacatggtgagacctcatctctacaaaaacacaaaaattagccaggtgtggtggtgaccacctgtagtcccagctacttaggaggcttagggaggaagattgcttgagcccagggggcagtggttgcagtgagccacgatcatgctattgcactccagtctgggtgacagagtgagatcctgtgtccaaaaaaaaaaaaaaaaaaaaagtctctgcaggcaacttagttgtacttttaagaaagatttgatcccagaagtttgagaccaacctgggcaacatagggagaccccatctttaaaaaaactaaaaaaattagctgagtgtagtggtgcttgcctgtagtcctagctacctgggaggctgacatgggtagatcccttaagtccaggaggtcaaggctgcagtgagtcataatggggccactgcactccagcttgggtgacagagcgagatattctgtctcaaaaacaagcaaaactatgaaaaaaaagtcaacatttcttgaaatacttctcatatttggtagaggagggagatatattgggataaaggacataggaagataggattttattataatattaatttctgtagttattcaacacaaattaatttttattgagcatttgctattagggcagtcactgggcttttacgtcagaatatagagattaattcctttccttaaggatctaatcatacaatggatgttttagattagaaaaatgttacaaggactataagagaaatgcacagggtactagaaaaaaggatcacatggttgtgcatttcataactggacaatgcctaaaattatgaagtgagccataagtgaagatgattttgcagttatatcagtgtatatttgtttaccatagcctgtgaatataactagtttcatcataggaaaaccctaatccagaatatattcatatttacatgagttgtgttctgctcatagttatggcaataaatatattcaattttaagattgtcagtatggaaaaatggcatttctgctgtgacgtaaatataatttactgaaaatgataattaaattatttttaaatgtaattttgttaccttcaagaatatgtgtgtagtcatgccaagttttcagaatctctagtaagtaaataacatgctgttaaaaatgacacaggtacaggggtcaagcacagtggctcatacctatagtctcagcactttgggaggccaagacaggagaatcccttgagctcaggagttcaagaccagcctggggaacattgtgagagattctgtctctatgaaaaatttaaaaaattagctgggcatggtggcacaacatctatagtcccagttgctcaggaggctaaggtgggaggatcccttgagcctgagaggttgaggctgctgttgggtgtgatcatgccactgcacaccagcctgggtgatagagcgagaccctgtcttaaaaaaaaaaattacaacctgaggtgtttgtatgccataaatgctattataggacttagaactaattttgctttccaaggtaaatattctccttgtaatcttatgttattctaataaattcattcttcataaagagtgccaaaaaacttgggatcatttttggtctaacaccagaaattgtgaattattaaggttataattgtttaagaatgattgcttttcgagatgagcagatcacttgaggtcaggagttcaagaccagcctggtcaacatggtgaaaccctgtctctactaaaagtagaaaaattagcagggtgtggtggtgcacgcctctagtctcagctacttggaggctgaggtgggagaattacttgaacccaggaggtggaggctgcagtgtgctgagtttgtgccactgcactccagcctgggtgacagaccaagattccatctcaaaaaaaaaaaaaaaagaatgattgtttttgctatatattcctataaaagaggcgttggcaaacttactgtgtaaagaggccagatagtaaatgttcttgactttataggccatgtggtcacctctgtcttaattacaaaagcagccataaacaataagtaaatgaatggttgtgactatgttccaataaaatgttatttgcaaagaaaaaaaaaatgaattttgcttggggccataatttgccaatttcttctctacaaaagaagtttagttaatagtaatttcccaaatggaattatttaaatagttgccattccaagtgtcttatttttgttcaaatttatgtttttctttatttgtttattttgaaataggagcacctaggctaaaatgtcaagaactcttaaattatatcatggatacagtgaaagattcatctaatggtgctatttacggagctgattgtagcaacatactactcaaagacattctttctgtgagaaaatactggtgtgaaatatctcagcaacagtggttaggtatgttttgaaggttgttgtttgtgaatttttcctcatgaaatgaaacttcaccaaagaaagcactctgtctgtatctgtctatatcccccaagtgacctgacagtttaacagtactttagtaaaattatatggttatcgaactgacccttaatttttatttattatgtagcttttgaataaagtcatgaataatatatcaggtgcctgatatcagagccggaattacagttgaaaaataccatctccatcgtcaaggagttgacagtggcagaagaaaacccaagtaaaccagagttcataatgtgctgtgatacagacatatttgggttcagtaggtatacaaaacaatgacacctaaactcaaccatgatttaagtagaaagggagaaaaccaagagagggaagtaccataaaagtgaaagcaggcagggtgcagtggctcacgcctgtaatcctagcactttgggaggccaaggccggtggattgcttgagctcaggagttcaagaccagcctgggcaacatggtgaaactctgtctttaaaaaaatagcggaggtaatggctcttgcttgtagtcccagttacttgggaggctgaggcaggaggatcacctgagccctggaggttaaggctgcagtgagctgtgatcacactgcactccggcctccatgacagagtgagaccctgtttccatttaaaaaaaaaaaaaaaagtgaaagcaagagagttgaaagttcaaaggggcgtggccaacattttaagtgttgtagaaaggataagacacaaaagtatccattggatgaggcagttagcacgctacttctaaggtaatggaaatcaaatatattagaatagaatgcattagaagacaatgtacagaacccagtgattcattagatgtgtagagtgtgtgctagggaggaatctggtgttgtttcctgtttatagctgggaggtactgagagaccacaaaggaaggaagttatggtcagagattgaaatacttcagtttgttggtttcaaagatggagcatttctgggtttgagaataagtgaaagtaggatttgacattaacaagatgattttaagtcaggtgtcaaagtcttctaatacacgaactctaaaagtttagaagcttttttttttcatggaaagtatttaagctaaattttgctagctaaattaaaagacatttgtccatattctttattgccattttattatttcaaaatgagatacatgtgaaccacaaaactactacctaatcagtaccctcactcctgcattacactctactgttcccctgagaataaatgccttctcagctaatttcttaggagtcatttgtagcctttacgttactctgaacacaagataggctgtgtctgtaacagggccctcaacaagcctagagacagcctttgggaataggctggtgatatctaggttacctaaccagatctttccccagtatggctggtcatatttaggtcattttacattatcacttacaaccatggctgtcactgaaacaaaggcagtctttcccctagtctgcttactatattctgtcatctagtttgttctctgaaaccccctttttatttttaaactaactactcttacttctttttttttcttttttctttttatttaagctaacctttgccacttcttcccggatgttacttcttataattagcttttttgtcaaagtatttttttacttagcttccttttaaaacttgcttagatgaggactctgtggaagaagcgaagtctgtgctcaaaatatatatttggtacaggtggtgactgaagccatgactatggatgagatttgtatatagagtttagtgtgagatgagaagaatggcctaagattgagtcagcatttgcatataaattttggaatcagcttactgatttctacaaaagatcttgctgggattttgatactaattgcattgaatctgttgcacaatttgagaagaatagaaatcttaacaatgtggagttttccaatccatgaacactgtatatctctccatttacttaggtttttttttttttttttttttttttgcttctttgtttgtttttttgagacagagtctccctctgttgcccaggctggagtgcagtggcacgatctcacctcactgcaacctccacctcctaggttcaagcgattctcctgcctcagcctcctgagtagctgggattacaggcatgtgccaccacacccagctaatttttgtatttttagtagagacagggtttcctcatgttggccaggctggtctcgaattcctgacctcaggtgatccacctgcctcagcctcccaaagtgctgggtttatagacttgagccaccgcgtctggccacttgtcttttttgatttctttcattagtgttttataattgtcagcatatagattttttgttgtaaattgacaattttttttctttaattttatatattaaaaaaaatagagacaggatctcactgtgttgcctaggctggtctcaaactcctgggctcaagtgatacccttcccttgacctcccaaagtgttgggattataggcatgagccaacatgcccagctgcaaattgacatttatttataattgtataaacataaagattttgtatatgttttgttagatttatactgcagtagtttgtaattgcattgtttttaacattttgattttcaaattgttcaatgcacaaaaattatacagaagtccagttaatttttgtatagtgaccttgtattttgggaccttgctaaaatcacttactaaatctagtagctttctttgaatgttcttttggattttctttgtagacaaacatgtcttctgtaagcagtaatttttttttctttctttctgagccatgtggcttttattttatttttgtgctttattacattggctaggacctccagtgtgatttattgtggtaaaatatatataacatttataattttaacttttttaagtgtacagttgtgtagtattaagtgcattcatattgttgtgtaatcatctccaccatccatctccagaacttttttttctatactcagtaaacaatgatttaccattttcccctcccctatcccctggcagctaccattctactttctctctctatgaatttggctatttggggtacttcatttttatggattgaatgttgtgtcccaccaattatgttgaaatctaactcccaaagggatggtatttggaggtgtgggatttaggaggtaattaggtcctgtgggtccagccttcatggatgggattaatgcccttatgaaaagaggccagagagctaacttgctgtctttctgccatgtgaagatacagttcaaagtcagtagtctgcagccccaaagagggccctcaccagaaacccacaatgctggcacctgagctgctttcagcctccaaaattgagagaaataaatttctgtggtttctaagccacctaacctataatactttgttatagcagcctgaagtagaggactcctataagtatttgtccttttgcaacctgcttattacacttaccaaaatgtctttgaggctcatcagtgttacagcttttgtcagaatttcacccttattaaaaactgaacactattctgttctgtgtatatgccacattttgttaattcattcgtccattggtggacatgggttgtttctaccttctgattattgtgaataatgctgccgtgaacatgagtatacatctcctgagtttcctgctttcagtcttttgattatatacccagaagtagaattgctagatcatgtggtaattctatatttaattttttaaggaaccaacatcctgttttacacaggagctacgccattttacattctcaccagcagcccacaagggttccagtttctctacattctcactagcacaactaatagaaaatgaggattcctcttctaggccttgaaagtgctgcataattttgcttcttcctacctgtctaacttaactaaagcgcttctaatttctgtgctcaagctacactgtcaattattcagtttctcaaacctagtggtttccatttttttaaattgacttttatcttttagaggaattttaaatttacagcaaaacggagtggaaagtccactggacacacacagcatgccctactgtcaacatcttgcaccagtggtacatttgttaccatcagtaaacctatgctgggacacatcattattatccagagtccaaggttcacttttggtggtacatatgctatggattttgacaagtgttttgacatttttaaagatctttttctgtatctaatgagatggtcatatttttttttcctctgggagagaatggtaacaatttttcactattacagaatcatacagaatactttcactgtcagaaaaatcctctgtgcttcaccttttcatctcttccttcttgtaaactgtgggaaccatggatctttttgctatctccatggtttagccttttccagcatgtcatatacagttgtgcgtctcttaacaatgtggatatgttctgagaaatacatcattaggcaatttctttgttgcgtgaacgtcatagggtgtatttatacaaacttagatggtataacactacgcacctaagctatatggtattactgctcctgcactacaaacctgtgcagcatgttactatactgaatactgtaggcagctgtaacacaatggcaagtatttgtgtctctaaacatatataaacatagaggaggtacagtaaaagtatagtataaaggataaaacatggtacacctgtctagggcacttaaccatgaatggagcttgcaggactggaagttgctctgggtatgtaaatgtgtggtaatgtaaaggcctgggatactatatactactgtagaatttgtaaactcttattctgtaccaaatttaaaaatttatgtttttctttcttcaatactaaagtaacattagctactataacttttttactttataaactttaaaaatgtttaaactttttgactcttttgtaataacacttagcttaaaatacaaatgcattgtacagctgtacaaaaatattttttccttatatacttatagatgttttttcttttgttctataagctttttaaatgaaattattattactctattttttcctttaaacttttttgttgaaaacaaagacacaaacacacacatgagcttaggcctacataaggtcaggatcatcagtatcactgtcttctgtccctgcatcttgtccccctgggagatcttcagggacatgcacagagctttcatctcctatgataatggtgctttattctgaaatacctcctaaaggacctacctgagactgttttactgttttgttttgttttgttttttaagaagaagaaggaggaatatagtataaaatggtgataaaaagcatagtagagtaagtacataaacctaacattttaccagtaacttagtcatttattatcattatcaaggtttatgtactatacatgattgtatgtattatacttttatatgactggcagtgcagtgggttttttttacacaagtatcaccacaaatgcttgtgagtaatttcttgtgctatgacatcactaagtatttaaataggaatttttcagttctgatacaatcttacggtaccaccttttcatattgccatttgtcattgaatagaatgttgttatgtagtatgtgactgtggttggaatcataacagtatgtatcattttcagattgccttctttcatttagtaatatgcatttaaggttcctccatgtctttctctttctttctttctgtctttctttctttctttttttttttttttttttttttttgagatagggcctcactctgtcacccaggctggagtgtggtggtgagatcatggctctgcagcttcgacctcctgagctcaaatgatcctcccacccccttccaagtagctgtgaccacagacacaagccatcacaccctgctaatttttcatttttagtagagataaggtcttattatgttgcttatgccagcagcttgaactcagcctcccaaagtgttgggattacaggtgtgaaccaccgttctcagctcctcgatgtctttttatggcttgataggctgaagtgggaggatcacttgagcccaggagtccaaatctagcctgggcagtgtagtgagacttccgtctcttaaaaaaacaaaaaacaaaaaaaagaggaccaaagttactgatattagaaatgaaatgagatctaattgcagatcctatagatattcaaaggataataaggaaacactatgaacatctattaatttaaatgggccagttcctcaaaaccatacattatcaaaagtcatccaatataaaatagataatttgactagtcccataactattaggagaataaattgaatccataatttaaagcctttcataagacaaattgggaacaagataaggatgtgcactctcaccactccttttcaacattatgttggaggttctagccagggtagttagacaagaaaaataaaaggcatacagattggaaaggaagaaataacactcccctttgtagatgacatgattgtctatatataaagtcccaatatacacaagtataacattgtgaataatgttatttggggactgggcacagtggcttacacctgtcatctcagcactttcggaggctgaggcaggtggatcatctaaggtcagatgatggcttcctctaaaacaggacagatttacttgtagcctattgattataaaaagcttgaggtttctctgttataactcagtccactgttttcgcagtgtcaagtgtcccatttcaccttgcctttggtactggggaactgatgcaaaaatgaaggtagtctggctaccatcattactgggagaaataaactgtcctttttctcttatcaggaatctcaggtttcctgctagcacccaggaaactgtcatgctaatttgttaggttacaagtagataaaatctcagccaggcacagtggcttatgcgtgtaatcctagcactttgggaggccaaagcaggtggatcacttgagcccaggagttcaagaccagcctgggcaacatggtgaaatcctgtctctacctaaaataccaatcagttgggtgtggtggtgtgggcctctagacccagctacttgggaggctaaggtgggaggattacctgagtctgctgagattgaagctacagtgagccgtgatcttaccaccacacaccagtttgggtgacagagtaagactctacctcaaataaataagaaacaaaccaagcagagtaaaatttcatacccttcataggtctcaacacattttttgcatattattaatcaaacagtattattattttaaaaaactgtggaggccaggcccagtggctcatgcccataatcccagcactttgggagaccaaggtgggtagatcacttgaggccaggagtttgagaccagcctgaccaacacggtgaaaccccatctttactaacagtacaaaaattagccaggcatggttttgtgcgcctgtggtcccagctacttgggagactgaggcatgagaatcacttgaacccaggaggcagaggttgcagtgagccaagattgcaccattgcactccagcctggacgacagagcaagattctgtctcaaaaaacagaagaaagaaaaacccatggagcatgtactgtaagtgctttcttaggcctagatgatggaacagaggcttagagaagttaagtaatgtttctgcgacctggctcttaaactggtgctctcacagcagtttatagttattcctgtcttaaaggcattttatataagataaaattaaatactgatggagtacttttactatgttaaaaataaattagtgcagttttaaaatcctttttctgtatgggattatggaatatttaagttaaattgtaacatttaatacattttgatttttaaaaaatcatgactaataatttttttttttttttaagaattgttctctgtgtacttcaggctctatctgaaaccttcacaagatgttcatagagttttagtggctagaataattcatgctgttaccaaaggatgctgttctcagactgacggattaaattccaaatttttggactttttttccaaggctattcagtgtgcgaggtaatctaatctctttttcttttgttttgtattgaaatacttttgatcttgcaagaccatgttttagactcagtaactaaaaattctaccttaaaataaaacattgatccatcataacagaactagtggattcctaaagagacaaccaagtccaacactttctgaatatccaatatgcagaacactacgtgaagttttcaagggggagatgtgtcttgctgatgttctgttgaccaggaaagttaaatatcctctaagtcattgcatttcccccattttgaggatggttttaatataccgagaataaaataaaataggaaaatattttggaagtattactgttgtacattagtatggcagtactcaatgtataatgtgaaacattttataaatggtgttacaaatcagttttgtttatttttatacaatgttttagcaggagggagagctaacagaagtggtctcttaacaccaaataagaactaattttttgtcagtgtgaagtaatgctgtgatttttttttttaatgaatagttttgaaattaagactactgtttgaaaattagggttttgtttttttttctttcagcataccacttcataactgttcagtttgtacagtttgttccccctgttatacccagttgagcttgtttgtttcttcacagacaagaaaagagctcttcaggtctaaatcatatcttagcagctcttactatcttcctcaagactttggctgtcaactttcgaattcgagtgtgtgaattaggagatgaaattcttcccactttgctttatatttggactcaacataggcttaatgattctttaaaagaagtcattattgaattatttcaactgcaaatttatatccatcatccgaaaggagccaaaacccaagaaaaaggtataaaggaaatgtttactgttttgaatttgcttcttcattcaaacatagaagtctaagtataaaattagtgttctttaggaggatatgactttcctctggatttctctggttgataatgttacttagccatgagaatgtttttcatagagtttttagaatttgaagcagtggtagcagattctgttatgcctttctatttgttcaatacaatattaggtattatgggaaatacaaaaaaatctgagacattgttccctctaggagctacttatgcatcaatacttagatactaaggggtctgacacagactgtagggcaaaagaatttaaagaaagcaggatcttgtttatccacctattacttttattagaagataaaatacgtaaattggactaaaaccagtcagattattcagctcctgaggaagatacatacatattactttaataggaatttgaggcagaaacagggaaattgctgccttaagcctcatagttactctagggccctgtttgccctagagtatcacttgttaaggagaatcacttattctccttaattccttcatatatgtcctataccaagagagtattgcccagaaggtatagtgcttttctgtagttaggaactttattggctggaactggagtttcctcttgctctgtctatgattgcctttgggcttatactagcctttggaccaactcatcatggctagtatagtgactttcttaaaacagcataccacattgagtaatagcagctataatggaggaaatgtcttgtagccactttttttttttttttttttttgagacagagtctcactctgtcgcccaggctgaagtgcagtgacgcaatgttagctcactgcaacctccgcctcctgggttcaagcaattctcctgcctcagcgttctgattagctgggattacagatgcctggcaccatgcccagctaatttttgtattttaatagggatggggtctcaccatgttggccaagctggccttgagctcctgacctcaaaccatccacccgcctcagcctcccaaagtgctgagattacaggcatgagccactgtgcccggccgtgtagccactttttatcaaaagtagctgtgtatttgttttatgggctcttctaataagtatatctagataatatgtagcccatgaaactactataagtgaaagaatagtgacttttaatagtttttcatcttttactcacctcttatctccaggatgaagatcaggcttattaggaggtgatatgatatgtttagggatttagttaactgcatatttagggtgaatttaaaattggcaggatgatgaggatgccagaaaagctaatgtagtttcagactactttaatagattttgtagtaccttgtttgtgagaaataatagaccttttgtttcgcatactagtcaagccacagttggattaccatgttcaccagattttgtatagtcagcattttaagttgactggaatgtgtcttgggaaagatgactgaaatggtgagaagtctgaataatatgtcatttttacactagttgaaggaactcgtaatatttttctcttaggccagaaaaaggcatacggagaacttggtcctcatatgaaagagggaacatattaattgtatttgcctcaggtgggagaataaattggagaaagacagattttaggtcagaatatggaagaaatttataagaaacacagttatctaaatgtaaaatggacagttatgaaatagagtttgtcaaggatcttgtcagaagaggcattagtactgaatggaaggttggaccaggtgtcttctaacgctgatgcagcttgacagctgaataattttgtgggagctagcagtgtaaacagagtacatacataaaaattacattttaattttttggattacaggtgcttatgaatcaacaaaatggagaagtattttatacaacttatatgatctgctagtgaatgagataagtcatataggaagtagaggaaagtattcttcaggatttcgtaatattgccgtcaaagaaaatttgattgaattgatggcagatatctgtcaccaggtacagtaagtaggtcatgtcacatttagaaatttcctgttaattttttttttaaactgggcattttgggcttttaaaacctgtgttctcacaaaaagcctataaaatgactctgtacatgcaactattcctttcaaactatcagaaatatttggaattacccttttaacttaaaagttaatgcttttgcagatatttgaaaactaacaatgaactttttcattcttaaatgattgtctctaggaaataaggtgaccctaaccctaatgattcgattcgactcgactgtattctacaaagtgctgggattacaggcatgagccaccaagcccagtctgtttcttttttgcaattaagctagagttcacatagcataaaattcacgattttgagttgtacatttcagtggtttttagtatttttactatgttgtacaaccatcatcactaattctggaaactttttttattttatttttatttttttgagatggagtcttgctctgtcacccaggctggagtgcagtggcacaatctccgctcactgcaacctccctttcccgggttcaagtgattctcctgcatcagcctcccgagtagctgggactacaggtgcctgccaccacgcccagctaatttttgtttttttagtagagactgggtttcaccatattggccagcctagtctcagactcctgaccttgtgatcctcctgcatcggcctcccatagtgctgggattacaggcgtgagccaccgtgcccagcccagaacttttttatcatcccaaaagaaacctcatcccttcttagcattcagtcccaattccctgcatctcctagatcctggcaaccagccactaatcaatcttggtttttgtggattttcctgtttgggacagttcgtttaaatggaatcatacaatatgtgagtcttttgtgtctggtttctttcactaagcataatgttttcaaagttcatgttttaccatgaatcagtacttcattcatttttattgctgaataatattcagttgtatggatatactccattttacttacccatccatcacctgatggcctaatgtttcttaaataaaactctgttccccagagatttggttaacatcctgagtagtaatttcactctgtcaaatattttcttaatatttcttaaaatttcttaaatttaaaaacttgaatccctttgaaagtaaaggtttttgctttacttttagatttcttagtgcttttagtaaatgttcccaggaaataaaactaatgcattacttggtaatacctgctttctaaagtgccattactgtcatgcaaaatgtttgtttcttactatgttatcagatttatatgtttctgtaatgtattactcttgctttatgagttccctgtatcttcatttcagaaagaattttttttccccctaatgaaatattagaagacaatagcaatgaaaaaagtgtatttggccaggcgtggtggctcacacctgtaatcccagcactttgggaggccaaggcgggcagatcacctgaggttgggagttcaagaccagtctgaccaacatggagaaactctgtccctactaaaaatacaaagttagctgggcatggtggtgcaagcctgtaatcccagctactcgggaggctgaggcaggagaatcacttgaacctgggaggtagaggttgtggtgatacgagatcgtgctgttccactccaacctgggcaacaacagcgaaactctggctcaaaaaaaaaaaaaagaaaaaagtggatttatttttattttacaggtttttaatgaagataccagatccttggagatttctcaatcttacactactacacaaagagaatctagtgattacagtgtcccttgcaaaaggaagaaaatagaactaggctgggaagtaataaaagatcaccttcagaagtcacagaatgattttgatcttgtgccttggtaaagtgttaccattttctcattcagtgtcattttaatctcttgtatgttatttttcagaaaactttcagtggaatcctttcatctcaaccagaactaagtcatttgtctacccccaaacctattactagcaaagggatatgtgattgccatgacaaatgagatcaatcattaatggctcatttgcttgggccaagtgcagggccacctattttaatcatattgtcatagcaagttaagaaggaggactggctctctgataggcaattagaagtgtgcacctcatggaattcactgaattgtacgcttcaacaatagattttagcatacgtagcaccttctaatagaattaggaagaagttaaagataatcttaagaaatcacagaataattttgaccttatgccatgataaaaagttattttctcttattttctatcttctttattctcatgtaacgttcacatatatttaagtaatcaaataaattatggatactttggaatcccaaaatattagatctggtaaggatgtttagaatttatctagttcagcctgtttgctttactgaaaagaaactgaaacccagagaggttaagcaacttctgtagggacagagatttatagattatagtcaaactcgtgatcagtgctcttttgattaccatgttgatggaatgtttaagtgtaagtgacttctggggaaaagcatattgatttagatacctattgcttaagctcatttttatatagttaagagtagctatttaagattcttaatttgtccttttagtcaagagtaatttattgaacacctgttatgggctaagcgttagatatacagagatgaataacataagactcctattcttaagtatcacacattctagagaatacacagcaaatgtttattggattaactgaattaatgtaaaggaaaaacagttttttgggtttctttgttttcctgttttagaggaatcgtttggtgactaaagagcaaggatgtacaagataactcagaaataaaatattgctaaatatatatatatatatatatatattttctgagacggaggctcactctgtcacccaggctggagtgcagtggcacaatcttggctcactacaacctccacctcccaggttcaagcagttatcctgcctcagcgtcctgagtagctgggattccaggcatgtgccaccatgcccggctaatttttgtatttttagtagagactgggtttcaccatgttggccaggctggtctcaaactcctaacctcgtgatctgcctgccttggcctcccaaagtgctgggaaaccacctggcccaaatattgctaatttaatatcctttaaaatatttgtttaagggaaacttaacagcttacccagctagccaaacgttgacaattttcctgccaatttaggaagtaggacatagtaactattaacagccagtttatttttagagtactatggaaatgatggtgattctctaattaggatattgtaagagtaccatgtctatatatttccttttagtttgttaatgtgatggaatagttttcaaattatcctttttttttttttttaggctacagattgcaacccaattaatatcaaagtatcctgcaagtttacctaactgtgagctgtctccattactgatgatactatctcagcttctaccccaacagcgacatggggaacgtacaccatatgtgttacgatgccttacggaagttgcattgtgtcaagacaagaggtcaaacctagaaagctcacaaaagtcagatttattaaaactctggaataaaatttggtgtattacctttcgtggtataagttctgagcaaatacaagctgaaaactttggcttacttggagccataattcagggtagtttagttgaggttgacagagaattctggaagttatttactgggtcagcctgcagaccttcatggtaagttcagcatgcattatgtctgacttacagataaacacacacagacacacacacactcacatatccctgatcattttcatagtttgttacttcagttaaagatgtcaaattctatttcagatgcttttcttgtttggccgagaagacttaataaatgcataagtgaatttagtttcaaatgttgacaaattattaaagactaatgttaaggaatttcttttttagttaaaaaatttttaattgatctataatagagttatatattatcaaggtacatgtgataatttgacacactcatatgacacactcatgtagggtgatgggatatcagcaccctacgtatcttttcttcatgctaggaacgtttgaattattctcttcttgctgtttggaaatgtacaatagattaatgttaaccgtagtcaccctactgatgtatcggacaccaggtcttattccttctaattgtatacgtgtatccaaaagactttctttaaagaattatgaagagtttaaatttcttttatgtgcaatttatcattatttattaaatagccatgtttaaattgtagtactatgcactgttaataaacgagctattttttaatcaagaatcttcccaaatgtaatcagacttttaacagtttttatgttcatttagtcaccttaactaaatgtatgtgccaggcactgtcctgatagataaagtctttgcccctccaatagcttgcttttcacaattgtcctttgttttgttatagtcctgcagtatgctgtttgactttggcactgaccaccagtatagttccaggaacggtaaaaatgggaatagagcaaaatatgtgtgaagtaaatagaagcttttctttaaaggaatcaataatgaaatggctcttattctatcagttagagggtgacttagaaaatagcacagaagtgcctccaattcttcacaggtaatttaagttcattagcatgctgctgttttttttgtttgttttatcaggctctctccacttatttgatgccagatggctttattttataataataatgcagaatttcccagatctaaccttaattattaaatattatgtttgtttttacagttatctgtgtctttatgcctgattgcttctgaaataaagggttgtctcactgtgagaatatgggggatgtgcatgaaaaatgcacatataattctttgagcatttatgtgttcctttctgattttttaaataagtaagtccatatatttgagtcatgtagatcctggatcctttctcataatgggagtgtcttttgggtaaaagatgttttatgaatgaggtgaggaaacgaggaagacaaaacaggatgtaagcactaggataaaggaatggagtccctcgtccacttaacctttccacagattggtaattggaaccaaatgattggagagcagacctccgaatggatccaattaaagtacttttgctttaattttacaaccttttatttatttcagaaataatgttaaacatgctgtttctaaacagtattggaaatgataataacaatggttgtcctccttaaattgtccttttagatattaagaaatttagtatagatgaaagcaattttaatctaggatccaaattttagaagtcaagatttatagctaaacatggatgttaaagtttaaagtattctttacatggcttttggtcttctaagtgaagctttttgtttttctttgtagtaattttcctcatcttgtactggagaaaattcttgtgagtctcactatgaaaaactgtaaagctgcaatgaattttttccaaagcgtgccagaatggtatgttatctaataatgctctttatcattttaagctatagctttaattacaaagatgataattttagctgggtagtagctgcatcttaataattgtaaactaaattggtccaaaaaaattgcaactgttagccagggaagaggttgttttaattcagtgattgtaatctatgttatataacattagaccaagcttactattttttaatgctgtatagtataatatgtgacaagtgccaatgagaaaaactgaatggttatgctgggaaattaagaatataaaatttatatgaaataagttcttaaagatgttacccatttctgtacatcaactatgatttgactatttgttagctttaaaaactaatgataattgaaaacaaaaataaatctaaacctgagtttagttgattgactcaagagacttagattgtattgctgtgactgaaaatgactcactggcacaaacattccttatctccctcaagagggcaaaaggatgcgtaactgcttacctataccagatgttaaaggtttttaaacctatgctctttacttcctctgcttggtgaaaaaagggatatgtttgcagacaatgttatgcttaacatttatatctggtgtttttaaaaatactttctgaatttgcctttgagattgtaacttgtattttttctctatctattagtaaaatttgctactgaataatgacatttgatataagtaggtctcaaagtccgaagaagagaagcatttaaaagaataatctattaattatataagtagtctttgaatgatgtagatactaggttaatgttttcctttgtaatatattgctaatacatataaggcaaagcattaggtacttggtttatatattaaagatcttactttcttgaagtgaacaccaccaaaaagataaagaagaactttcattctcagaagtagaagaactatttcttcagacaacttttgacaagatggactttttaaccattgtgagagaatgtggtatagaaaagcaccagtccagtattggcttctctgtccaccagaatctcaaggaatcactggatcgctgtcttctgggattatcagaacagcttctgaataattactcatctgaggtgagattttttaaaaaaagaactaagcttatatatgattcaactttggtaaactgttaggaaggagaaataggggcaggaaaaacagcaaggatggtgggaggcttcattttaaaagcaaagtggcagtaaagggctctaaattggacaacttagcataattaaaggaaaactcaagaataataatttgagtacttcctttgtactggaaattatggtagacataaaataattccttgtgtaggttagtgaggaatagtaagagtttgagcatagggattatatgatgaaaaaaacctctaaatacaaaggagggaaatgttacagtaatagaaaagaacacgatgtaaacaaatctaatagattttggtggcatctgaagagagatgagtgattagtaaagacaataaatggactagcaattattttagacgtcatctaggaatttcctttagcctcaaaatcacgagttctcttcatgtatactattctcttgccaaaacttgcattttttaaaatgtgaaatgtctttctacctatttctgtgtattcagatcatccacatgtgaaaatccttgctaacgcctttcttagaatctcagaaagtaagattctaagaatttttatttttgagacagagcctcgctctgttgcccaggctggagtgcagtgacgtgatcttggctcactgcaacctccgtcttccagttcaagcaattctcctgcctcagtcttccgagtagctgggacaggcgagtgctaccacgcccaggtaatttttgtatttttagtagagatggggttttgctatgttggccaggctggtcttaaactcctgacctcaggtgatggacccgcctcagcatcccgaagtgctaggattacaggcgtgagccacggtgcctggcctaataatttttcatcttttaatttcatagtacttaatgtttcacatttttaatggcagttagcatcttctttataccatggatatttacatatggtttgtatacaaatatctcttgaactataactcttaaacataaactcttaaaagggcatacatgtttttatttatctttatatcctccacagtgccttattacatggtaaatgattaaataaagcctacaatccattcaaaggagtgaattcggtagccagggaaaatgacttgaggacatgagaggggacagtgtgcctctttatgatctttactgacattcttctgcaccacaattgtaaccactttcattacaaagtaatttagttttgtatattttctcctaaaatgccgtttcctaccctgtaggaacaaaaaaaatctgaacattttgtgtgtaacttagcagattcttagtaattctataaaattgtctaaactttttttttttttttttttttgagatggagtcttgctctgttgcccaggctggagtgcagtggcctgatctcggctcattgcaaccttcgcctcctgggttcaagcaattttcctgcctcagcctcctgagtagctgagattataggtgcctgccatcacgccctgctaatatttgtatttttagtagagacaaggtttcaccacgttagccaggttggtctcgaactcctgacctcaggtgatctgcccgcctcggcctcccaaagtgttggggttgtaggcgtgagccaccatgcccggccagctgtcaaaacttgtatctactagaaaaaatgttttatgctattctgtggagtctaaaaagctgaataagtcaaggttcctattcttcagaagcttaaaatgtcattttaatgtctctttatatgactgtaatttctacttgtgttctaagacttacagtcatttatttgcctgtgaagctttttttcttttctttcatccctacctcaaatatttaagggcctatgtgtacagtacaccctccaccctaagatgatatatcctgcttggccatcaggagatacttaggctatttttcttgagaatcctggttataattctacagtgatctcctagttgtttttagagctatccaggatatgccacctttaactcagttaactgaacttttgttttttaatatgtatgtagaatttgttcttacaaaagatagagtatactaaattatttatgaaatatatatatttttatttgtggtttactttaagattacaaattcagaaactcttgtccggtgttcacgtcttttggtgggtgtccttggctgctactgttacatgggtgtaatagctgaagaggaagcatataagtcagaattattccagaaagccaaggtaggagaatttatactaataaagtttcggataaatttgaatgaaatgtattcctgtgaaaattattacatttgtttggaagacattaaattttatgcaggttaaccctttctcttttatttatgtaatgtgagaagaaattatactatgtattttttaaattgttttaattgtttaatttttaattattattatactttaagttctggggtacatgatgtagagcatgcaggtttgttacatagatatacagtgccatggtggtttgctgcacccatcaactcgtcatctgcattaggtacttctcctaatgttatccctcccctagcccccgaccccctgtcaggccctggtgtataatgttcccctccctgtgtccatgtgttctcattgttcagctgccacttatgagtgagaacatgcagtgtttgtttttctgttcttgtgttagtttgctgggaatgatggtttccagcttcatccatgtccctgcaaaggacatgaactcatccttttttatggctgcatagtatatcatggtgtatatgtgccacattatctttatccggtctatcattgatgggcatttgggttgcttccaagtttttgctgttgtgaacagtgctgcaataaacatacgtgtgcatgtgtctttatagtaaaatgatttataatcctttgtgtatatacccagtaatgggattgctgggtcaaatggtatttctagttctagatccttgaggaattgccacactgtcttccacaatgattgaactaatttacactcccaccaacagtgtaaaagcattcctgtttctccacatcctgtccagcatctgttgtttcctgactttttaatgataggctgtaagcatgaaactctttcttatctcttggtagtactctgtcactggtatgatttgcaagaacagagtataagatttgccattttaaaaaattgttaatgagttttgcttatactgtatgactacgtggaacttctaaaaacatttcattttttctcttaagtgcactttattttttattttatagtatgtccaagatcaaagtacactgtaaaaagcaatactaaactataattttaactggaatttgcatttttccttctattcacaatagtctctaatgcaatgtgcaggagaaagtatcactctgtttaaaaataagacaaatgaggaattcagaattggttccttgagaaatatgatgcagctatgtacacgttgcttgagcaactgtaccaaggtaagattttcttcttcttgttttgttttttgagataggatctttctctgtcacccaggctggagtgcagtgggattgtcacaactcattgtagccttgacctcctggtttccagcaattctcctgcctcagcctcccaagtaattgggactacaggcatgtaccacctagctaaaattttctttttacttgaaagtgtagcctatgcagggaattgatcactggttggtgttactgttttggtgtccactcgtaagtttattttttacttttatttttcttttttttgagacagtctctcactctttcacccagagtgagtgatcacatcactgcgatccagcagcctcgacctcctgggctcacagcagcctcgacctcctgggctcaagtgattctcccacctcagcctccttagtagctgggactacaagtgtacaccaccatgcctggctgatttttgtatttttgtaattttttgtattgatggggttttacacattgcccaggctagtctcaaaccctgggctcaagtgatgcttacatctcaaagtgctgtgattacaggtgtcagctaccatatctgttcacattcataagttatacaaattgatttaaaattcagttgaatggtacataaaggtaatatccagacaaataagcaataggaatctgagtttctcatgaaactaattttataatttcaggaatttttctgagattgccttatgacttttatatacaaccatatagatgactcttttattcctgggacactttcattcatttaataaaaattttttgacccaaactatgtggtatgcgtagcggggctagtgagcaacacaacaataactccagcacatagtttactttcttttgctcagatcaccttacataacatttggtagaaagagtgctactgtgtttaatctttgtttttatctgcagcagcctgtgggatagccaagccaggccccagagtattgataataattggaaatatatttcaaacctagtattaggtacatggccatatagcaatattatcaacatatttcttggttttgtaatgtgtttttcctcctttttggtgtaagtggggaaggagaaaagtagaataaactctaacctataattatagctcacttatctttagggtcaatagctgttactttaatgttgttaaagcacaatgaaagatgtacagtatagttattataactctaagaaaagatgtgtttttgaagcagcatatatattggccctaatagtaaactatttatctacattccattcaagatagagaaaacactgtctgccaagaataattgtttttatttctttgttgcttggttctttgtttgtcttaattgcagaagagtccaaataagattgcatctggctttttcctgcgattgttaacatcaaagctaatgaatgacattgcagatatttgtaaaagtttagtaagtatgcttcctgttttgctatcatattttgattctaataggcataatttttttgttgaaatatctttgtaaataaggatgcatctcacaacatatagctcttaacatttttacaaatgtggaaattaaggccaggtgcggtggctcatgcctgtaaccccagcactttgggaggccgaggtgggtggatcacaaggtcaggagattgagaccatcctggctaacacggtgaaaccccgtctctactaaaaatactaaaaattagccaggcgtggtgacatgtgcctgtagtcccagctactcgggaggctgaggcagaattgcttgaacctgggaggtggaggttgcagtgagcgaagatcgtgccactgcactccagcctaggcgacagagcgagactccatctcaaaaataaaaaaatttaaaaaattaaataaaatgtggaaattaaataatttgtcttgtggggaaatatacctgattgcttcttaatatcaatacctagcatagtagtgcctgcctttagtttctcaataaataatacatttaaaaattgggaacgaatcatccaggctcacagctatatctgcgcaacattgtaccaaaatttaaaataattatttgttctttaaaagtgaccaaaaatcttgccaggcaagcaacatattcttattgtagtatttatttttcttccatacaaatgggcttatgccacatacattcttttttctggaacactgccgggcatacaaagtagttattgaaatatctattgagtgaaaacatattctgtaacttatttccattttatgacacatcttaatcattttccatgtcactgtacttattttataagctatctgctgttatactttatttatttagcagtgcatggtattctattgtgtggtgatagtgaatagtatatatgtatatgaaagcttatctgctcttttttttttttttttttttttgagacaaagtcttgctctgttgcccgggctggagttcagtggcacaatctcggctcactgcagcccccacctcctaggttcaagagattctcctgcctcagcctcccaagaagctgggattacagatgtgtgccaccacaaccggctaatttttgtatttttagtagagaccaggtttcaccatgttggccaggctggtctagaattcctgacctcaaatgatctgtccaccttggcctcccaaagtgcttggattacaggtgtgagccaccacactgagccaaaaagcccatctgctcttaattaacattttaagtggtttctagttttttgggttacaaagacttctgtggtacagattattgtacttttgtctatttgtatttgtgtgtatgatggatgtaggataatttctagcagtagacttgcttgttcaaaaggaatgtgaattttactttttgatggatattgtcattgtcctccaaaatagtcataccaatttaggcattttcctacaccctctttgggtaacactttaggtgttacaaaacttcttaatataagaaataattttgagggaggagccaagatggccgaataggaacagctccggtctacagctcccagcgtgaacgacgcagaagacgggtgatttctgcatttccatctgaggtaccgggttcatctcactagggagtgccagacagtgggcgcaggtcagtgggtgtgcgcaccgtgcgcgagccgaagcagggcgaggcattgcctcactcaggaagtgcaaggggtcagggagttccctttctgagtcaaagaaaggggggacggacggcacctggaaaatcgggtcactccccgaatactgctcttttgcgacgggcttaaaaaacggcgcaccacgagattatatcccgcacctggctcggagggtcctacgcccacggagtctcgctgattgctagcacagcagtctgagatcaaactgcaaggcggcagcgaggctgggggagggatgcctgccattgcccaggcttgattaggtaaacaaagcagccgggaagctcgaactaggtggagcccaccacagctcaaggaggcctgcctgcctctgtaggctccacctctgggggcagggcacaaacaaaaagacagcagtaacctctgcagacttagatgtccctgtctgacagctttgaagagagcagtggttctcccagcacacagctggagatctgagaacgggcagactgcctcctcaagtgggtccctgaccctgacccccgaacagcctaactgggaggcaccccccagcaggggcacactgacacctcacatggcagggtactccaacaggcctgcagctgagggttttgtctgttagaaggaaaactaacaaacagaaaggacatccacaccaaaaacccatctgtacatcaccatcatcaaagaccaaaagtagataaaaccacaaagatggggaaaaaacagaacagaaaaactggaaactctaaaaagcagagcgcctctcctccaccaaaggaacgcagttcctcaccagcaacggaacaaagctggatggagaatgactttgacgagctgagagaagaaggcttcagacgatcaaattactctgagctacgggaggacattcaaaccaagggcaaagaagttgaaaactttgaaaaaaatttagaagaatgtataactagaataaccaatacagagaagtgcttaaaggagccgatggagctgaaaaccaacgctagagaactacgtgaagaatgcagaagcctcaggagccgatgcgatcaactggaagaaagggtatcagcgatggaagatgaaatgaatgaaatgaagcgagaagggaagtttagagaaaaaagaataaaaagaaatgagcaaagcctccaagaaatatgggactatgggaaaagaccaaatctacgtctgattggtgcacctgaaagtaacggggagaatggaaccaagttggaaaacactctgcaggatattatccaggagaacttccgcaatctagcaaggcaggccaacattcagattcaggaaatacagagaatgccacaaagatactcctcgagaagagcaactccaagacacataattgtcagattcaccaaagttgaaatgaaggaaaacatgttaagggcagccagagagaaaggtcgggttaccctgagagggaagcacatcagactaacagcggatctctccgcagaaactctacaagccagaagagagtgggggccaatattcaacattcttaaagaaaagaattttcaacccagaatttcatgtccatccaaactaagcttcataagtgaaggagaaataaaatactttacagacaagcaaatgctgagagattttgtcaccaccaggcctgccttacaagagctcctgaaggaagcattaaacatggaaaggaacaaccggtaccagccgctgcaaaatcatgccaaaatgtaaagaccattgagactaggaagaaactgcatcaactaatgagcaaaataaccagctaacatcataatgacaggatcaaattcacacataacaatgttaactttaaatgtaaatggactaaatgctccaattaaaagacacagactggcaaattggataaagagtcaagacccatcagtgtgctgtattcaggaaacccatctcacgtgcagagacacacataggctcaaaataaaaggatggaggaagatctaccaagcaaatggaaaacaaaaaaaggcaggggttgcaatcctagtctctgataaaacagactttaaaccaacaaagatcaaaagagacaaagaaggccattacataatggtaaagggatcaattcaacaagaagagctaactatcctaaatatatatgcacccactacaggagcacccagattcataaagcaagtcctgagtgacctacaaacagacttagactcccacacattaataatgggagacttttaacaccccactgtcaacattagacagatcaacgagacagaaagtcaacaagtatacccaggaattgaactcagctctgcaccaagcagacctaatagacatctacagaactctccaccccaaatcaacagaatatacatttttttcagcaccacaccacacctattccaaaattgaccacatactgggaagtaaagctctcctcagcaaatgtaaaagaacagaaattataacaaactatctctcagaccacagtgcaatcaaactagaactcaggattaagaatctcactcaaaaccactcaactacatggaaactgaacaacctgctcctgaatgactactgggtacataacgaaatgaaggcagaaataaagatgttctttgaaaccaccgagaacaaagacacaacataccagaatctctgggacgcattcaaagcagtgtgtagagggaaatttatagcactaaatgcccacaagagaaagcaggaaagatccaaaattgacaccctaacatcacaattaaaagaactagaaaagcaagagcaaacacattcaaaagctagcagaaggcaagaaataactaagagcagaactgaaggaaatagagacacaaaaaacccttcaaaaaattaatgaatccaggagctggttttttgaaaggatcaacaaaattgatagaccgctagcaagactaataaagaaaaaaagagagaagaatcaaatagacgcaataaaaaatgataaaggggatatcaccaccgatcccacagcaatacaaactaccatcagagaatactacaaacacctctacgcaaataaactagaaaatctagaagaaatggataaattcctggacacatacactctcccaagactaaaccaggaagaagttgaatctctgaatagaccaataacaggatcagaaattgtggcaataatcaatagcttaccaacaaaaaagagtccaggaccagatggattcacagccgaattctaccagaggtacaaggaggaactggtaccattccttctgaaactattccaatcaatagaaaaagagggaatcctccctaactcattttatgaggccagcatcatactgataccaaagccaggcagagacacaaccaaaaaagagaatgttagaccaatatccttgatgaacattgatgcaaaaatcctcaataaaatactggcaaactgaatccagcagcacatcaaaaagcctatccaccatgatcaagtgggcttcatccctgggatgccaggctggttcaatgtacacaaatcaataaatgtaatccagcatgtaaacagaaccaaagacaaaaaacacatgattatctcaatagatgcagaaaaggccttggacaaaattcaacaacccttcatgccaaaaactctgaataaattaggtattgatgggacgtatctcaaaataataagagctatctatgacagtcccacagccaatatcatactgaatgggcaaaaactggaagcattccctttgaaaactggcacaagacagggatgccctctctcaccactcctattcaacatagtgttggaagttctggccagggcaatcaggcaggagaaggaaataaagggtattcaattaggaaaagaggaagtcaaattgtccctgtttgcagacgacatgattgtatatctagaaaaccccactgtctcagcccaaaatctccttaagctgataagcaacttcagcaaagtctcaggatacaaaatcaatgtacaaaaatcacaagcattcttatacaccaacaacagacaaacagagagccaaatcatgagtgaactcccattcacaattgcttcaaagagaataaaatacctaggaatccaacttacaagggatgtgaaggacctcttcaaggagaactacaaaccactgctcaaggaaataaaagaggatacaaacaaatggaagaacattccatgctcatgggtaggaagaatcaatattgtgaaaatggccatactgcccaaggtaatttacagattcaatggcatccccatcaagctaccaatgactttcttcacagaattggaaaaaactactttaaagttcatatggaaccaaaaaagagcccgcatcggcaagtcaatcctaagccaaaagaacaaagctggaggcatcacactacctgacttcaaactatactacaaggctgcagtaaccaaaacagcatggtactggtaccaaaacagagatatagatcaatggaacagaacagagccctcagaaataacgctgcatatctacaactatctgctctttgacaaacctgagaaaaacaagcaatggggaaaggattccctatttaataaatggtgctgggaaaactggctagccatatgtagaaagctgaaactggatcccttccttacacctgatagaaaaatcaattcaagatggattaaagacttaaacattagacctaaaaccataaaaaccctagaagaaaacctaggcattaccattcaggacataggcatgggcaaggacttcatgtctaaaacaccaaaagcaatggcaacaaaagacagaattgacaaatgggatctaattaaactaaagagcttctgcacagcaaaagaaactaccatcagagtgaacaggcaacctacaaaatgggagaaaattttcgcaacctactcatctgacaaagggctaatatccagaatctacaatgaactcaaacaaatttacaagaaaaaaacaaacaaccccatcaaaaagtgggcgaaggacatgaacagacacttctcaaaagaagacatttatgcagccaaaaaacacatgaaaaaatgctcatcatcactggccatcagagaaatgcaaatcaaaaccacaatgagataccatctcacaccagttagaatggcagtcattaaaaagtcaggaaacaacaggtgctggagaggatgtggagaaataggaatccttttacactgttggtgggactgtaaactagttcaaccattgtggaagtcagtgtggtgattcctcagggatctagaactggaaataccatttgacccagccatcccattactgggtatatacccaaaggactataaatcatgccgctataaagacacatgcacacgtatgtttattgtggcattattcacaatagcaaagacttggaaccaacccaaatgtccaacaatgatagactggattaagaaactgtggcacatatacaccatggaatactatgcagccataaaaaatgatgagttcatgtcctttgttagggacatggatgaaattggaaatcatcattctcagtaaactgtcgcaagaagaaaaaaccaaacaccgcatgttctcactcataggtgggaattgaacaatgagatcacatggacacaggaaggggaatatcacactctgtggactgttgtggggtggggggaggggggagggatagcattgggagatatacctaatgctagatgacgagttagtgggtgcagcacaccagcatggcacatgtatacatatgtaactaacctgcacaatgtgcacatgtaccctaaaacttaaagtgtaataaaaaaaataataatttttaaagtttgcatattattttgttatgtagacatattacaggttatatatccattttactattgttggacatttagtagaaaaagtactgtagttttcatacttacacatgaaccttgaattgtttgattaggtaaattttttttttttttttttttttgagacagagtctcgcttcgtcaaacccaggctggagtgcagtggcatgatctcagctcactgcaatctctgcctcctgagttcaagtgattctcctgcctcagcttcctgagtagctgggattacaggtgcccaccaccacacccagctaatttttgtattttaaatagagacaaggtttcaccatgttggccaggctggtttcgaactcccgacctcaggtgatccacctggctctgcctcccaaattgctgagattacagatgtgagccactgtgcccagcctgattaggtaaattttgactacagcatgctcctgcaagaagccatcttgaacatctttgtttctcttccttgaaggcatccttcatcaaaaagccatttgaccgtggagaagtagaatcaatggaagatgatactaatggaaatctaatggaggtggaggatcagtcatccatgaatctatttaacgattaccctgatagtagtgttagtgatgcaaacgaacctggagagagccaaagtaccataggtaaatacatatttactacttgggatttcttttacttctttatattgatttggcagtataagaggcctcattgatatcaattttgtgcttatttcattttctcttagtatagccttttaggattgttcctttcttatatactttattttttttttatttttacttgaatttattagtttcatattttattcttcatagaaggaacttaagataactattaaagaaataaaaccaggccaggcatggtggctcacgcttgtaatctcagcactttgggaggccaaggcgggctgatcatgaggtcaggagatcaagaccatcctggctaacgtggtgaaaccccatctctactaaaaacacaaaaattagatgggcgtggtggcgggcgcctgtagtcccagctactcgggaggctgaagcaggagaacggcatgaacctggggaggtggaggttgcagtgagccgagatcatgccactgcattccagcctgggcgacagagcgagactccgtctcaaaaaaagaaataaaatcatatgataggttatttcctcaatagaaagcaggaaatgaaaacacacctgtaatgccattgcttttaacctttttctattatttctctgtagaaacattcaaaattgtagtcaacatcaacattcacatgttatgaatgcctgtttaattataagtatttttccaggtagttgcttttcttgatagtcatactttttaatggcttcaccatttttctgtcataaataccataatttacttgacattttttattgtcagaaatttagattcttttctattttcctacaataaacattattgcaatgatcatttgtctaagggtttttttttctcatattttaaattatttcttgacaacagaatcttggataatttttcaaaaagacttttgaagctttcagtatataattaatttcactataattttgcttttcatatacttttttttgtgaagaggaggaaatttgagttaatatgactatatatggctgttgtgcccttctcttagtgttaatgagtgctttttatttttaggtgccattaatcctttagctgaagaatatctgtcaaagcaagatctacttttcttagacatgctcaagttcttgtgtttgtgtgtaactactgctcagaccaatactgtgtcctttagggcagctgatattcggaggaaattgttaatgttaattgattctagcacgctagaacctaccaaatccctccacctgcatatggtgagttacgttaaatgaagaagctcttggattttatctgatgttgctgactaaatgtaatgagttgacatgtaagaatcacatggtgtctttgaagaattgaaattgctttcttgagaaatgaacctgagactagttggaaaataacacttttaacgtgctgtgagcaaatttaagtggatgctgaaatattaaaacttagatgggttttggatagatttattctctttaggtttaattgttataaattattttaattaggctaagaaacatagaccctgaatgtaaaaatattacataacattgtgtttgaagttggaaccttgcctttgaccttagtttatatattttcagttttttggatttgatttcaaaatgatagtgaagttacaagaatactacagttaacgttttaccatatttgcttaatcattccctctctccacacacacactcatacgcagatacacacatcattttctctgaaccattttgagatgaaatcgcacacgtgatgctccttatacttcagtgtatatttcctaaaaacaaggatacacttctgtttagccacagtataatcatcaaaatcaggaagttaacattttgtcattgcatttaggtgtgtagtctgtttagtctccttcaatctggaacagttcttttttttatttatcatgaccttcatatatttgaatagtacaggtcccttgctctgagtttgtctgatgtttccttatgattaaatttatactttgacgagaatgttgcaaaagtaattcctcttctgccttcaccctgtccatttatctgtctgttgatagatatcttcaaatccaagccaacatcacacagtttatctttttttctgtccaaatttataaattgctttactagcagttaaaaaaaacaccccaaaacctgactatccactcaacctgaatgcatttacttatttgctcaacaaccttatatataactaatctaaccatgtgggccattttcttagccctagccccagtgtatgtggaggtagagcctctggcctagcgagtagcaagttgggtcctaggtcatgtccccagttccagcaaattgtcacacatgcctggtgagtccctaattagaacctctgatcacagtaaattgtaggctgagtcattggtggaatccctggtcatgtttcccacccttggtgaaaatgcacgtcaatcccttagagtgagaagacaagtttggttgtgccctgtttgggcccctggtttaggtcctcgcagatactcaagtctctatccctgaccaagaggaagttacatgcttttcttgaagtattgatgtttcaagtcacttcagaacattcagtaacctcatgtacatgactctcatgtcaaataatgaaaaggatcatttaatttcctttgttaatatctgaaaaggattaagaaatatattattctatatgtaaataggaaaaaaaatcccttattatttcagtatagccagaaaattatttggtagttctcggaaactggctgcccagataataactaccattataactggtcgttgcagcagccctttctgtgcatagtaccataaagagccttacaagattgccttatgggaagataggtcaaggtttttgacttcttccctgcccatgattatctctgctttccaaaattcattaatagttttcaaccactggtctattatccccaagcattattttgggagagtggagacttacagtttcagaatcttgctcaagctcttaactgcaacagtggtaataatgatcatttattgaattccacaatagaagctagacttttacgtttattttctctaatcctcacagttatctggccaggtaagtgatatatcttcactctactgatgagggtacgaaggccctagatgacataaggcaagttttttaccagaaaagttaaggctgtggtactgggatttgaattttctgtttgacttcaaagccttttgtttttactatacacctcttaaatatttacagctgtgtgtgtgtgtgtatgtgtgtgcatgtatgaatttatgtttatatacttaaaaaaaatttttttttgagacggaatctcgctctgttgcccgggctggagtgcagtggcgcgatctcggctcactgcaaccttcgcctcccaggttcaagcgattctcctgcctcagcctcctgagtagctgggattataggcgcctgccaccacccctggctaatttttgtgtttttagtagagatggagtttcaccatattggccaggctgttctcaaactcctgaccttgtgatctgcctgcttcagcctcccaaagtgctgggattacaggtgtgagccactgcacccggcctatgtttatatactttttaaagtaaatgatttgtggataaacctgatttttttccctcctaccatcttagtatctaatgcttttaaaggagcttcctggagaagagtaccccttgccaatggaagatgttcttgaacttctgaaaccactatcgtaagaaattaaaaccttatgttatgttcactttaaagttataaaataactgatgtgttctgttaagcttataaagttgaactttttttttttttttaccacagcaatgtgtgttctttgtatcgtcgtgaccaagatgtttgtaaaactattttaaaccatgtccttcatgtagtgaaaaacctaggtcaaagcaatatggactctgagaacacaagggatgctcaaggacagtttcttacagtaattggagcattttggtaggtacagtctattttgtggtcctatttttcttttgctatctgtggatacgaatgcaagttttgtatccacatcagtgatttcttctgatcttcctacatagctaatacatcttttaagaatagcagaatgtaatttgtgtttccctcagtcgcttgaagaactacattgctttttgtttaaggcttggctttctaaaccgtttaactcatttctctgcaaattttgaatcacttaataatttgacatgtatagtgaataaaggataacaagccaaaatcagttgaattgttcatgttccctaagtgaacaaattggccttgtccttatctggttattttatgcatattgtcacattccaagataacaccctgatacttacagaggagcacatacatataatttagaacccttgtactatctgattgctaagtaattctaaatcaatagactgttttttgtttttgtgtttttttgagatggagtctcactccatcacccaggctgcaggctggagtgcagtggtgctatatctgctcactgcaacctccgcctagtaggttcaagcaattgtcctgcctcagcctcctgagcagctatgattacaggctcccaccacaatgcctggctaatttttttgtatttttagtagagatggggtttcaacacgttggccaggctggtcccaaactcctgacctcaagtgatctgcccaccttggcctcccaaagtgttgggattacaggtgtgagccagtgcacccagcctgaatgtggttttgaaatcttcaatataccaaacaaagaaatcttcaatataccaaacaaagaaatttctttctaaagtaagtttactgtaatgtagtttagccattctatggtagcccccaaaaaaggacataatggtataaaacaaataatatacgctaaaatgaattcttttacactaatttcttttagcttgaatttttggcaaggtgagtatgttggcatattccacataatgacaaataagtttagcacagaaagacatattggaagtaacttacaataacctttcagtgagttttctgagtgcttttatcagaatgattatttaactttggaaaacttacttgatttcaggcatctaacaaaggagaggaaatatatattctctgtaagaatggccctagtaaattgccttaaaactttgcttgaggtgagtttttgcatttttttagtaagatctccattgaaaattttaaagcagtctttgtttgttaatgagtaatttttctctatttcatatttaaccacagttcttttcccgtaggctgatccttattcaaaatgggccattcttaatgtaatgggaaaagactttcctgtaaatgaagtatttacacaatttcttgctgacaatcatcaccaagttcgcatgttggctgcagagtcaatcaataggtaatgggtcaaatattcatgaagtatttggaatgctgcagatggcagtagaatgtcttacatagtaacagctcacagttgcaatattaaaaatagctaacacttgttgagtatatacggtgtgcctggcatttatgtttattcttaattcttatacttctgtcacttagattctattatttccttcaatttataaatgaaaactgtgacttagtgaggtaaagtaacttgcttatgccacagagctaacaagtggttgactcgagtgaggtgtgtctactatcatgtacaggagatacggactgtttggaaattactgtgattttatgtgagtttatgaaatgataattagcacattttacattgtgctaattacaattatatttacttgagtgaacatccagtgaagcactggaaggattctatcatgaggatcttttatatttgagtactggaataaacatatattaatttcattctttttttttttttttttttttttttttgagatggagtttcgctcatgtctcccaggctggagtgcaatggtgtgatctcggttcacttcagcctctacctcctcggttcaagcaattctcctgcctcatcctcctgagtagctgggattacaggcgcctgccaccatgcccagctaatttttttatttttcgtagagatggagtttcaccatgttggccaggctggtcttgaactcctgacctcaggtgatccacccaccttgtcctcccaaagtgctgagattacaggcgtgagcctttaatcatgtagtttttgtcattcgttctgtttatgtgatggattatgtttattgatttgtgtatgctgaatcagccttgcgtcccagggatgaagctgacttgatagtggtggataagcgttttgatgtgctggattcagtttgccagtattttatcgaggattttcacatcgatgttcatcacggataatggcctgaaattttctttttcttgtgtctctgccaggttttggaatcaggatgatgctggcatcataaaatgagttagggaagagtccctctttttctattgtttggaatagtttcagaaggaatggtaccagctcctctttgtacccctggtagaattcggctgtgaatccctctggtcctgggctttttttggttggtaggctattaattactgcctcaatttcagaacttgttattggtctattcagggattcgacttcttcctgctttagttgggaggttgtatgtgtctaggaatttatcactttcttctagattttctagtttatttgcatagaggtatttatagtattctctgatggtagtttgtatttctgtgggatcagtggtattatcctctttatcattttttattgagtctatttgattcttctctctttattagtcttgctagcggtctgttttgttaatcttttcaaaaaatcagctcctggattaattgatttttttgaaaggttttttttgtgtgtgtgtgtctctatctccttcactcagctctgatcttagttatttcttgtcttctgctagcttttgaatttgtttgctcttgcttctctagttcttttaattgtgatgttagggtgttgattttagatctttcccactttgtcctgtgggcatttagtgctataaatttccctctaaacactgctttagctgtgtcccagagattctggtacattgtgtctttgttcttattggtttcaaagaacttacttatttctgccttcatttcattatttacctagtagtcattcaggagcaggttgttcagtttccatgtagttgtgtggttttgagtgagtttcttaatcctcagttctaatttgattgcactgtgatctgagagactgttacgatttccattcttttgcatttgctgaggtttgttttactttcaattatgtggtcagttttagaataagtgtgatgtggtgctgagaagaatgtatattactctgttgatttggggtggagagttctgtagatgtctgttaggtctgcttggtccagagttcggttcaagtcctgaatatccttgttaattttctgtctcattgatctgtctaatattgatggtggggtgttaaagtctcccgctattattgtgtggaagtctaagtctcttcgtaggtctaagaacttgctttatgaatctgggtgctcctgtattgggtgcatatatatttaggatagttagcacttcttgttgcattgatccttataccatcatgtaatgtccttctttgtctttcttgatctttgttggatgtttgttttatcagagactaggattgcaacccttgctttttttctttctatttgcttggtaaatattcctccacccctttattttgagcctatgtgtgtctttgcatgtgagatgggtcccctgaatacagcacactgatgggtcttgactctttatccaatttgccagtctctgtcttttaactgggacattttagcccatttacatttaaggttaatattgttatgtgtgaatttgatcctgtcattatgatgctaactggttattttgcccattagttgatgcagtttcttcatagtgtcaatggtctttacaatttggtatgtttttgcagtggctggtaccagctttgcctttccatatttagtgctaccttcaggagctcttgtaaggcaggcctggtggtgacaaaatctctcagcatttgcttgtctataaaggattttatttctcctttggttatgaagcttagtttggctggatatgaaattctgggttgaaaattattttctttaagagtgttgaatattggcccccactctcttctggcttgtaaggtttctgccgagagatctgctgttaagtctgatgggcttccctttgtgggtaacccgacctttctctctggctgcccttaacattttttcattcatttcaaccttggtgaatctgatgattatgtgtcttggggttgctcttctagaggagtatctttgtggtggtctctgtatttcctgaatttgaatgttggcctgtctcgctagattggggaagttctgataatatcctgaagggtgtttccaacttggttccattctccccatcactttcaggtacaccagacaaacgtagatttagtcttttcatatagtcccatatttcttggaggctttgtttgttccttttcattcttttttctctaatcttgtcttcatgctttatttcattaagttgatcttcaatctctgatatcctttcttctgcttaatcagttcggctgttgatacttgcgtatgcttcacgatgttctcatcctgcatttttcagctccatcaggtcatttatgttcttctctacactgattattctagttagcagttcctctaaccttttttcaaggttcttagcttccttgcattgggttagaacatgctcctttagctcagaggagtttgttattacccatcttccgaagcctacttctgtcaattcgtcaaactcattctccgtccagttttgttcccttgctggtgaagaattgtgatcctttgcagcagaagaggcattctggtttttggaattttcagcccttttgcgctggtttttcctcatcttcgtggatttatctacctttggtctttgatgttggtgacttttgtatggggtttctgtgtggacatcctttttgttgatgttgatgctattcctttttgtttgttagttttcctttttacagtcaggcccctctgctgcagatctgctggagtttgctggaggtccactccagaccctgtttgcctgggtatcatccatggaggctgcagaacagcaaagattgctgcctgttccttcctctgggaaggttcgtcccagagcggcacccgccagatggcagcgggagctcttctgtatgaggtgtctgtcgacccctgctgggaggtgtctcccagtcaggaggcacgggggtcagggacccacttgaggaggcagtctgtcccttagcagagctcgagcgctgtgctgggagatccgctattctcttcagagctggcaggcaggaacgtttaagtccgctgaagctgtgcccacaaccacccctttccccaggtgctctgtgtcagggagatgggaattttatctataagctcctgactggggctgctgcctgtctttcagagataccctgcccagagaggaggaatctagagaggcagtctggctacagtggctttgtggcactatgttgggctccacccagttcgaacttcctactggctgtgtttatactgtgaggggaaaacatcctactgaagcctcagtaattgcagacgcccctccccccaccaagcttcagtgtcccaggtcgacttcagactgttctgctggcagcgagaatttcaagccagtggatcttaacttgctggtctccatgggggtgggatccgctgagctagaccacttggctccctggcttcagccccctttctaggggagtgaatgggtccgtctcgctggcgttccaggtgccactggggtatgaaaaaacactcttgcagctagctcagtgtctgcccaaatggccgcccagctttgtgctttaaacccagggccctggtggtgtaggcacccaagggaatctcttggtctgcgggttgcaaagactgcgggaaaagcgtagtatctgggcaggaatccaccattcctcacagcatagcccctcacagcatagtccctcacggcttcccttggctaggggagggagttccccgaccccttgtgcttcccgggtgaggctacaccccaccctgctttgactctccctccgtgggctgcacccactgtctaaccagtcccaatgagatgagccatctacctcagttggaaatgcagaaatcaccaccttctgcgttgatctcactgggagctgcagaccagaactgttcctatgttgccatcttgctgttcccttgttttatttttctctagtatttatgataacgtgaaacatattttaatatatttacttctccgtattccactagtatatatgttcctaaaggcactggtttttgtctgttctgttcattgttgtatttttagcacctaaaacaatacttggcatgtgataggtatccaataactgttttaaaataaatgaatgtacttgaaaaaaaattacatgatgcttcaaaaacatcaaagctgaaaatcatttgagtaactttaaaatgtaagcaatcaataataaaagattactatattgttcagcagtcacataaagtattaaaactaatatttcagtatttgaatatgccgacagtaatgttttcataaactagattttgtgtctaactcctcaggtttggaactgtttttagtaagaccataatgcattgcaaggatttctaatgaatatgtttagtagttcaagcccttattaaatttcacagataaaagcaaatgtatgctgaactttaaggactgaggtaatataagactgaattgaatgtaataaggcggcagtgtagtggtggcattaaaaaaactgaagattcaaaaagtataaattcaagaataacatgcaagtagcattcttttttttaattttacacttgttagattttgtcttagtccctttgtgttgctataaaggaatacctgaggctggatatttacaaagaaaagaggtttatttggcatatggcgtctacatctggtaagggcctcagactcatggcagaaggcaaagaggaatcagtgtgtgcagagatcacatggtgagagaggaagcaagggtggaggcggggaaggccatgccaggctcttttttttaataaccagcccttgtgggaactgaatagtgagaactcactcattccttaccctcaggccttaatctattcgtgagggatctgcccccatgactccgacacctcccattaggcataacctaatggggatcagatttcaacatgacatttggaggggttaaacattcagacaatagcagatatctaatgttcagctattttaagagcagtgagtgaaactagaagaatcagaggaacataaacaattataaaagcttcgattactaaaaaaggataaaagacaaagttgattaaagagttatccttaaatatgtgggtgttacgcaaaaggtgtactgatcaacttttttccatcacataaaacaaaatttaaatggtacataaaaacattaacttacccgctttcagagtgattaaatgttagagcaggttgacattggaatctgtggactcaactaattggtgttcggccagagaacagtttatcttttctggctagtttgagttcagtgctgttcaaatttgagcaatagttaaaatatattttgagaccctcttcagttctaggagaaaatagattttgtattcaagaccttaatactaagctgctggtctgaacctctttaaataaactcaggttttgttagtctttaagaaagagctagtatgttattatgtctcacagagtgatttatttttgttctggaatatgctttggaaagtagggtttgaaattagaaaattatttcactttttgtttgtttgtttgcttgcttgttttaagattgttccaggacacgaagggagattcttccaggttactgaaagcacttcctttgaagcttcagcaaacagcttttgaaaatgcatacttgaaagctcaggaaggaatgagagaaatggtaattttaagtaacatgtatttgctgttatcatatgcttgctatgaatatcccataaattacttcaccaagtttggtataagagagtttataatccagtagtttacagtataaagctgctctaaaacaactgtatgaattgattgaaactgcattctttctgggtcacaatgggtcaaatcatagcaatttcttttggtttagcatttttatggagaaacccaaaatttaactgagtttttatgggagtataaatggctcccttttttattttaaaaatccttttatatgtgatctgattaaaagctaattaagggaacaggtgacaatgggaagaaatggattgaggagaagaatctcacacaaaatcaaatcattgtggtgtttacagtgaaacttgtgatatttcacgtttctgtagaataatatattttttatggtaatgattatcttagagttcaaattttttcatttatttatgccctggtttgtttcttacaagtatttaaggtagttaaataactgtcaagtctgtgatagcaggaaattgaaaggaacaattgaaagaatgtgagtttagaaaagaatttcaatagattagaaagataagtgtaaataacataaaatctaatgagataatgtatattatacattttaaatcagcctgtcatctgcaaaaagggaaaatactgatctgacagcaattcatttagaaaaagacctaggaagttttgtatcttgtgattatagtatgaatcaacattgtattacagttaccaaaaaggctaactctgtcttacactgcattaatagaagcatattgtcatgaacaaagttaatacaagaacttggatcttttatactttttgctttatttttagatcttttaatttttatgggtacatagtaggggtgtgtgtgtgtgtgtgatacgggtatacaatgtgaaataatcacatcatggagaatggggtatccatcccccaaacaaatatcctttgtgttacaagcaatccaattacactgttttagttattaaatgtttctgtattttttagaggataactataatgtttggtttggttctgagtaaagtaaaagatttttagccagaatgttatagatctgtgtcttataaaaaatggatgaaggaattgacttagtggaaagctcacatttgtttttaaacatgtcagtgcttgtgatttagcaaaggtattggtccttactctttcttgtaccaaaagacagaactaggattagtgagtaggaggtttctgaaatgtgtatagcttgtcaaaaaatctggagttcagttgggattttataattgattgttaaacatttacattttacattacattttttttttaatttctttttaagtcccatagtgctgagaaccctgaaactttggatgaaatttataatagaaaatctgttttactgacgttgatagctgtggttttatcctgtagccctatctgcgaaaaacaggctttgtttgccctgtgtaaatctgtgaaagagaatggattagaacctcaccttgtgaaaaaggtatatatggatgagtattttattagaagcttccttaggtcactgtgaaataatttaaaaagttaaagctagattttctgagtggcacttatttaagactaggaaacaattttattttttaggttgggaatattggaaagcagttatacaaaaactattcaaatggtatatttatggtatgcactgtttcttacattccatttaagagcatttcacaaggctttcattgtactaacaagagtgaatgacttgtccaccagactgaccaggcttttggaaatagtatttattgagggaaacacatggagacaagagcagcataggtgttttgcccggtagattctggggcagcacattgggatccagcagggccagaagtcaaattttagagctatcaggcttttaagttcagttatcaggggagaaggactagggtccaagccttataattactacatcagcacagtattatagaatgttggccccgtctcttttccatcacctcagcatttatggtttaggaagttccagacctttccattgcaaatttttatgtgataaatcagtggtaggtcagtggactgatattatgccagttaacattctaccagcatagtttccatggtgctttggagtaagccagcctataatcagttagccttttacctctcagtataagacttgttcggtgtttcttaaaagtatacaaatacattacctaataatcataagtgttatgtattgtttggatttttcttatttggatttaagcctaagagaaataattttactttatatttatttatttattttgaaagacagggtctcactctgtcacccaagctggagtgcggtgatgtgatcatggctcactgcagtcttgacctcctgggctcaagcgatcctcccaagcctcctgagtagctgggactacaggcatgtgccaccacacctggctaatttttttttttttttttgagacggagtctcgctctgtcgcccagactggagtgcagtggcatgatctcggctcactgcaagctccgcctcctgggttcatgccattctcctgcctcagcctcccgagtagctgggactacaggcgcccgtcgtcacatccacacacctggctaatttattatacagacgggctcttgctatgttgcccaagctggtcttgaactcttgggcttaagcaaccctccctcctcagactcccaaagcgttgggattacaggtgtgaaccaccactggccagtaattttacattaaatcttcctttaagtataaccaaatgttggaaactcttagcatatttttatatttttatttacttaacatttattaagggtttgctatgtgtcagatactgtgccagttgagtacattttcttaattattattcccatctcatagatgaggaaatcaagaaaagttgaatgaatgttgtttctaggtcctactctaaataatattaacaagcatttaaatgatttatttttttcatttttcttaacacattgactttttggttcgtgcaggttttagagaaagtttctgaaacttttggatatagacgtttagaagactttatggcatctcatttagattatctggttttggaatggctaaatcttcaagatactgaatacaacttatcttcttttccttttattttattaaactacacaaatattgaggatttctataggtaagtttatacatgacatatgtgaaatttgtttaatttaaaattagttaacaatacttagcaagtcccctcaccagcaacacacataccatacccatacacatgtgtgtgtgggagcctacatagtatgagaagcaggacagcttcttttaataagaatgtattgaagggagtcactggacttcagatctggtcctagctgtgccaacaaccagctatctgactttggtcaaaccacataaagaccctctatgccttggttttttaatatgtaaagtaagcaagttacacaaggagatctttcaggtccttttcagctttaatatttgatcatctttcctttggaaaaaattgaagataaattactagtagctggttatttctgccttgtttttcttttctgttgcttgactataggcctcttagttattacttctattagatttagaaacttaatgtaaaactttattttgctaactttaactctgtagaagaaaaatttgaaaatggagaggtttgaaacaactaaaaagtaatgtttaggtatcaggatgatgggaaggcatctcatatttgttgaacatgctctgtgttatggactttgctatgcattttacatgtagtgtatcacagatctgagtttcagacttatcctaatagagttttctaatagattatgagttgtatgtaggtagtttcctttaagaaggatattcctacaaaagtaaatttagtggtccttatagttcattcattttggcaagaacaatatagctatatctctgtatatgcgagggattcattccaggatcccccatgtatgcctaaatttacgcgtactcaagtcaccaagttggccctgcagaacccacgtatatgaaaagtcagtcctctgtatatacagactttcacatcctgtgaatactgtttttctatctgcatttggttgaaaaatatgcaagtataagttcaaacccatgtttttcaagggtcaactgcatttatgttagttgattatgcagaagaaataaatataaattcaagtctccatttttatttgtttattgttttgttttttctttttgctaagggtgctactgaacaaggtcccatttttaaatcccataattatggtggtggtatgttctaagctttctaatttttttaatgtgactatttagaatttacttaatttttccatttataaaattaaagaatgtttaataatctggataaagtatgatactttaatgctgatggtattaaaacagtttttaagaactattttataaaattttacttggaaaagttatatataacctgtattttaaatttttctatttttagatcttgttataaggttttgattccacatctggtgattagaagtcattttgatgaggtgaagtccattgctaatcagattcaagaggactggaaaagtcttctaacagactgctttccaaagattcttgtaaatattcttccttattttgcctatgagggtaccagagacagtgggatggcacagcaaagagagactgctaccaaggtctatgatatgcttaaaagtgaaaacttattgggaaaacaggtatggcttcaatttttatgtacttttcattccctgaatgatatgagatataacctttaagttttaaggctatttattcgatttattcgtatttatatattgaaacttagcttgtggtaatcattatctagcatagccaacccatgaatttttttggttatgtcgtgttgtctccctctgattggcttttaactaagtagaaatgttttaaattagaaataatccaaaaaaccatttgaataattttcttctgccatttaaaaatttattttaactgttgtaatacacgaatgcaaactggttgttaaagtcaaggaatactaaacagtgtacagaaaaccttcactccctcttcaatctcaccaagctttccacttttcaagaaaaacaaccgtccctcattcctatagttctcataccctgctgtttgtttttttgtgacacttattaccttctaatgtatgatacaatttaccttttttttctgtctttgcttttgtttttgagacagagtcttactcttttgccaagactggagtgcagtggcatgatctcagttcactgaagcctctgtctcctgggttcaagcaattctcctgcctcagccacccaagtagctgggactacagctgcgcaccaccacacccagctaattttcatatttttagtagagacggggtttcaccatgttggccaggctggtctttaactcttgacctcaggtgatcttcccacctcagcctcccaaagtgctgggattacagatgtaagccaccttgccagaccataatttacttttgaattatgtttattatttaccagtcttctccagtatacatttttctctctttttttttttttggctgatgtatctctaatatattttgagtattcattaaatgtttgtcaaaagaaggagtcaagtaaggaaggatttaaaaagcttcgtttgttttataatcatttatatacatttccaaaattttttgaagcaacttatattaaaacatacatacaaattttttaagataaaaaagctgtggtcaccccacatttatgtatgtatttatttattttggatataagtaagggataagtaaccaaacttggtcaatattagataaacttcaagggaccttttttttttttagtttcctagttatctatattgaaccaagaaatggaacagcaagttccttagttgcttaggtggacctattcagaactggttgtaagtctgcagtctgaagggaaatggtgagcagaggactcctttcccaaagacagctggaacagaaataggcactccagaggttatggaatttgagagagatactcagcctctagccactcccattcaatctcccagcttagtcttctgagcattcttaatcttactattcttttcttaatgtattcaaaccaaaagacagcaatttttagagcctgaataggttttggagggaaaagtaattacgttcaacttcgattgaaactcttgcctcaagaatgaagaacagcaaaaattaaatcacagtttcttagctttttggttaaagatgtaagttaaattcttggccgggtgcggtggctaacgcctgtaatcccagcactttgggaggccaaggcgggtggatcacctgagatcaggagttcaagaccaacctggccaacatggtgaaaccccatctctactgggtgtggtggtgtgtgcctgtaatcccagctgtttgggaagctgagtcaggagaatcacttgaacccgggaggtggaggttgcagtgagccaagattgtaccactgcattccagcctgggcaacagagcaagatttcgtctcaaaaaaaaaaaaaaaaaaaaaaaaaagaattgtataaaacacacaaacaaagcaaggaaagaatgaagcaacaaagccagagatttactgaaaatgaaattatactccacagagtgggagtgggccctgagcaagtggctcaagggcctggttacagaattttctggggtttaaatacccttcagaggttttccattggttacttggtatacaccctatgtaaatgaagtagtggtctgtaatcagtctgattggttataggaggggaccaatcagaggtactttcaatttcttatctgccacagtaaaagggagggggttgcaaagggagtagcctcttgtccttttgttacttgagcatggaaagttggggttttccttttgatttcgttctaggaggtcagcatggattgaccttaggttccctgcctccagaccttattgccctgcctcatttacgttaggtttctttcttgtcaccttctaaaatattttttgttattaggaagtatgtttttgaacttccttatgcattaagtaaattagccatttatcactgtaattccttatttggaaagttgttatattcacccttaagacttcacaattctcattcatttaactaaagtgcaacatagcagacttattctttatatttagagaatttgtgtcttttgtgaagctacctgtctatagtgggaagtagattaatgaaaagtccaaatctgttggggagggttttattctactattgatgaaaggggatgtggatcgcagctagccttagaatttgggatggcactcaagtagaagtctgggaagaagttacgcagggaacaaagatgacattgttcgcagtccctgggaattcttaacagtaaagttctgtaattgagacagaattcccaaataaagtcaagagtaaaattcagatagaggagcagttatacatcagtgggaaatttggttggcagaaaaattaccaggtcatacaacttaatgatagacctgaagtcttatttaaaatgattctctaaaattgaagaattggattaagggggccttgtttggctgattttcatactttttcctcttagtctacaggttggctgcatagaagaaaaaggtagagttatttataatcttgtaaatcttggactttgagtcatctattttcttttacagtcatcgaatacttttggaaataaggtaatatatgccttttgagctgtcttgacgttcacagatataaaatattaaatatattttaattttgtgcccttgcagattgatcacttattcattagtaatttaccagagattgtggtggagttattgatgacgttacatgagccagcaaattctagtgccagtcagagcactgacctctgtgacttttcagggtatgtacattttaaacttagagaactagctctaacttcacaagtttttaaagaagtttattggttgacaccttcaatgtctatttcaatttatagacatcactctttttaaaaaattttctttaaaaatagccacctttgaattgaggtaattacctatcctcttttaccatagtctccccacagtaattactctttctaaattgaccacttggttggccaacccaataaccttttcttagtctttctgtaatatttgaacattgtgccatctgttggcccttgaaatttttttcttcatacacattattcctagttctcttctctttatctaggtcttgcctttctagatcaccttttctttttttttttgagatggagtctcactctgttgccctggctggagtgcagtggcataatctcggctcactgcaacctctgtcttccaggctcaagctatccttccttccacctcagcctctcgagtagctgggacgacagatgcacatcactgcgcctggctaattttttatatttttggtagagacggggtttcactgtgttgcccaggctggtcttgaacttctggcctcgaatgattcccccgtgttggccaaccaaagtgctgggtctacaggcatgagccgccgtacccagcctcaccttttctttattgtgcgttattatctgtacaatttaatttggatgtgaatgtctctgagttgtatatgaacatcagagttgtttccctggcttgattgtaagctacttgaaaatatgctttacttttttttttttttttttaatgtgccctactgtgctgggcatataaaatagtaataatatctgagaaagtactttcacatatgtaatttcatgctgtctaaataagtgttgattgccatgtcttaaagtactgcttttacagtactggcatagagctttgattctgatctgaagtaatactgaggctcatttattgaactgccttttaactttataagattttttaagaaaatcattataagatcatttaagattatttaagttactgagggtgaaaggtatttagataatctgatttatatatctggactgtgatatgtcatttgtgattttattgaaagtatagtttttcagtagaaaaatggtttttgaatttgggggttattaaaatctaaattttcattttggaagttcactggtctatgaacaaaactttttaaaacgatgactgtattttttcccttaactctgttagggatttggatcctgctcctaatccacctcattttccatcgcatgtgattaaagcaacatttgcctatatcagcaattgtcataaaaccaagttaaaaagcattttagaaattctttccaaaagccctgtaagtatacatgatgagtttaataatagaacattccttcttttttagctaaaaaaactttgtaaatacatcttaaagaggaaaagtaaacaaatgaaaaatttatctcataattaaaaaggaaaacattcatttacaagtttaaatggtattttacttgtcagcattaattgaaatatgttacatatgagaacagaatcttgtgacactttagtgatatattagctcagggaatatatctactttttcataggaatatactatttaattgtagtttactttctgaaaattaaataaattggcaatagtttaagatagtaattttcttaatgtaacattttgtacttgatatcaaacccaaatctaaattctgttatttagttattttaaatataaaatgtgtaggtattcaaatatttgaagaaaaaatataaagtgtatttattgtagccgagtatctaattaaacaagtttttactaaatctgtttattttctaggattcctatcagaaaattcttcttgccatatgtgagcaagcagctgaaacaaataatgtttataagaagcacagaattcttaaaatatatcacctgtttgttagtttattactgaaagatataaaaagtggcttaggaggagcttgggcctttgttcttcgagacgttatttatactttgattcactatatcaaccaaaggtaaataacatatttagaccaatatataagcagtctttctatcctgttcttcctgtttttttgctttgttttgttttgttttgagacaaagactcactctgtccgcccaggctgggtgcagtcacggctcactgcatcctcaacctcctgggttcagattatccttcctcctcaccctgccgggtagctggggctacaggagcataccaccatgcctgactaattttttgtgttttttgtagaggtggggtttcaccatattgcccagggtggtctcaaactcctgggctcaagcgaactgtcagcctcagcctcccagtgtgctgggattacaggcatgagctactatgcccaacctatcctgttcttttaattgaaagtttatatgcttctaagaggtagataccagaatgttgctttctgaattttgctttttaagatgtctattatatttacttattagtttttaaaaattgcgctacttgcctgggaaacatagcagacctcgtttctactaaaaattttttaaaaaagaaaattagggcaaggtgtggtagctcacacctataatcccagcactttgggaggttgaggtaggtagattgcttgagcccaggagttagagaccagcctgggcaacatgatgtgaaaacccatctctacaaaaattttttaaaaaataagccagggattgtggcatgcacctgtagtctcacctactccagaggctgaggtgggaggatggcttgcgctcaggaggcagaggttacaggttacagtgagcaaagattgtgccactacactccagcctgggagacagagcgagactcttgtctcaaaaaaaaaaaaaaaaaaaaaaaaaaaaagaaaattatccaagtatgatgatatgcgcctgtagttctagctacttaggaggctgaggtaggaggatggcttgagctcaagagtttgaggctgccagtgagccttgattgcaccactgcattcatgcctgggcaacagagtgagactttcactcaattaaaaaaaaaaaaaaaagcactacttctccaattctagaaatcttaagaaggatcttcaacattttaatactaatattctagctattgatggcctcaaataaatgttactatagaattggggttgttcggccgggtgtagtggctcacgcctgtaatcccagcactttgggaggctgaggcgggtggatcacaaggtcaggagatcgagaccatcctggctaacacagtgaaaccccgtgtctactaaaaatacaaaaaaattagccaggtgtggtggcaggtgcctgtagtcccagctactcaggaggctgaggcaggaaaatggccagaaccaggtaggcagatcttgcagtgagtctaattcgcaccactgcactccagcctgggcgacagagcaagactccgtctcaagaaaagaaagaaaaaacaaaaacaaaacaagaattggggttgttcaatttagcatctctgatcttttccattgattttaatgagatttctattttttaaggtcttttttattgtggtaaactatataacataaaattttttattttcgccattaaatggccagttcagtagcatcaattacatttccattgttgtgcaaccatcaccactgtctatgtccaaactttcattatctcaaactgaacctctctactcattccacaataactccacattcctcctccccactggccattgagaaactaatctattttctgtctcaatgaatttgcctattgtagatattttaatctagagttgtacaatatatgtccttttgtgtcttgccttgtgtggtcactgaaaactttgtaccttagcttgtgtttagatagtgtttgatagagatttccttggataccaagagtgttgggatgaggaagcatgagaggagaaaacttttcctagtgtttgcagattggctttatgctaggattcttcttcaacacttagccatgcttgcattgcttgggatcagccccaaatacaagcttagggtcttctctggtcttttctgagcaagagtcttatcttgagcatgtgtgtggctttctgaattccccctaatttgtgggtgcttttgaatatactaatttcccaaagaaatacgctccccagctactcctaggctttaggcagcctcttgtatgtctcaacagtaatcttttgccctatgcacctgcaggttgttggtctgccttacaaagtttcaagcaacacccatatcttttgtagctggtatgaagttaaacaaaacagagctacgcactttacatcagtccttggttccagacaggttagaatagacatatacaatagtttgcaactaatctacttagctccatgaactaccatgagccagtgtctcacaccgaggatataggccactgcttttgtgattgttgccacgctggggtaggggtgggcaaggacaagtaaagttaccacaaagctttcctgctgtttttcagttggatttttcttgattcaatattttcctgattactgtaaacctttgactattttacagaattctaacaaaattagttctgacaattttgcctgtttttcaatgtttctattaaaggatggaagcttagagctgcctattctgcattttgctgatgtgacttctctttttggcttataagccattaaaatatttatgtcaaggcatataagaattagagatgctgaacaaaaggacttctgaatgaatttatttcagagtaattttccagaacttactggttgttgttgtttttttttctccctatattaggccttcttgtatcatggatgtgtcattacgtagcttctccctttgttgtgacttattaagtcaggtttgccagacagccgtgacttactgtaaggatgctctagaaaaccatcttcatgttattgttggtacacttataccccttgtgtatgagcaggtggaggttcagaaacaggtaattttctgactcatcttcaaaatggtatttaaaatatataaagtattgttagaaggatttgagtgttttatgtttatttggtataattggtgattttattgagaatattttttgtaaaatgattggaaaaatattcttaatgaattaacctttgtaatcaattacagagcacttggtacttttgatagttttatctactgtgctgaagtagagaggtagtcaaaactagggatagcagttcgcaacgttatggtggtatttgagttactacttatataaactgtttcattaatattggcattttttttaacctcagtacccatcttgtagtagtaccttacatagttattgaattatttgaaaacacagaaactaaaagctgggtatcttagacgtaattagaacatttaatctgatctaggttaatagattttatcatttattacagtaagttttgttggcttactttaaaattatttctctccttataattttttctttttaaattatatttaggtattggacttgttgaaatacttagtgatagataacaaggataatgaaaacctctatatcacgattaagcttttagatccttttcctgaccatgttgtttttaaggatttgcgtattactcagcaaaaaatcaaatacagtagaggacccttttcactcttggaggtaataaaaatttcatcatctactattttttattagagaacatagtagtacttttcaaaaatctgtaatgctctagcagtaaaaaatggaatcttttctttaattgtgattaaaaatatatacgtaggccaggcacattggctcatgcctataatctcagcactttgggaggctgaggcaggaggattgcctgagcccaggagttcaagaccagcctgggcaacatggcgaaaccccgtctctacaaaaaattagtcgggcatggtgatatgtgcttgtagaatcagctactcaggtagctgagatggaaggatcacctgagccctggaggtcaaggctgcaataagccaagattgctccactgcattccagcctggatgacagagtgagaccctgtctcaaaaaaaaaaaaaaaaaatatatatatatatatatatatatatgtgtgtgtatataaacacatacttgtgtgtgtgtaacgtgagatctacctacttaagaaataaaaaaatgaatcttaatgtatctctttgcattgaagccaaagtataaataacaaaacttcctggtaaagatccaaattgtaagttttcaaggaatgtgatgtaaaatagttttgattttaacacataagatcctaaggtccactgatagctcaaaactaccaatggatcttttcaatgtcaatttaatgtttgtgttagagataacgtttaacttttgaaagcatattttaagttttaatctttataaacctcgaaattatgtttaggtatattcttccatacatatcttaattataatttttaaatgatagtctgtatttgactctatgtaaatataaaaacatatttaagtatgttaagatgtaaagttatactactaaagagaaatttaagcatttccttccagttgagtatgctataacaatcttgaagtctgtgttaccatgagagagtctattagaatttaaaggattaggctgggtgcagtggctcacgcctgtaatcccagtgctttggaaggctaaggcgggcagatcatctgaggtcaggagttcgagaccagcctggccaacatggcaaaaccccatctctactaaaaatacaaaattagctgggcgtggtggcacattcctgtaaatgccaccttttcaggaggctgagacattagaatcacttgaaccggggaggcggaggtagcagtgagccttgatagcgccactgcactctagccttggtgacagagcgagactctgtctaaaaaagagtattaaaacattgtagggtttgcagtggaagaaatcatttatttcttccttgattagtagtaatagagacatgagtcagtgtctataaatggcacttaactaatttttttcttttattaagttttatttcacaggcttaaccaatacgtgttaaaagcaagttacattttctcttttaggaaattaaccattttctctcagtaagtgtttatgatgcacttccattgacaagacttgaaggactaaaggatcttcgaagacaactggaactacataaagatcagatggtggacattatgagagcttctcagggtgctaattttaaatgacatgggctatttctacctgtttctttttgaaagaatattttgcaaagtcttgctcttggtttcattgtcacagacttagttcagactctcatcatttagttcagaccctcatttctcatctaactgtaaaactggtcctaactggtcttctcaccctgaactcttcctgttttattcatcctctgccagatgatttctctaaacccaaatatgatcatgtttttctactgcctaaattttttttttaagagacagagtttttttttttttttaagagtctcactctgtcacctaggctggagtgtagtggcaccatcataacttactatgaccttgaattcctgggtacaaggaattctcctgtctcagccttctgaatagctggaacaacaggcacacaccactacacctagctactttatttattttttttattttttgtagggacaggggtcccactatgttgcctaggttggtctcgaattcttggcctcaagtgatcctcctgccttagcctcacaaagcattgggattagaggtgtgagccacggcatctagccatgcttaaacatttttcatttctttttctttttttttaagacggagtttcgctcttgttgcccaggctggaatgcagtggcactatcttagctcactgcaacctccacctcctgagctcagattctcgtgcctcagccttcctagtagctaggattacaggcacctgccaccatgcctggctaattttttgtattttttttagtagagacggggtttcaccatgttggccagggtggtctcaaactcctgagctcaggcaatccgcccacctcagcctcccaaagtgctgggattacaggcatgagccaccgcggctggcccatgcttaaacatttttaacaccttccaaccatgtaaaagaaaattttaattccttagagccagacatacaagttagtcttgtcttctagtccagtttacctgaatgaaagaaatatgtctcattttaatactttagtcatatgtgttatgtgtgtctatatatatgtaagtatgtatttgtaagtttttctagcttgcttgttaatttgatttgaaatgtacattattacagtatttgggaaactttctactttgtgttttgattttcatcttcctataccaattaatttcatatttcttttttttttttgaaacgaagtctcactctgtcgcccaggttggagtgcagtggcacagtctcagctcactgcaacctccacctcctgggttcaagtgattctcctgccccagcctcccaaggagcagggattacaggtgtgtgccaccatgcccagctaattttttgtatctttagtagagacggggtttcaccatgttgtccaggctggtcttgaactcctgacctcaagtgatccatctgcctcggcctcccaaagtgctgggattacaggcgtgagccaccacgcctggcctaatttcatatttctcttgtgttgtttttactctcagtactttttaaaatgaattttagttttgactatctgagcatagagtttctaatacatttgagatatataaaatgtatgtaaatagaaacaccattatttcttgtacttgtgttcttgagtattttatgggctagagatctgccttgtgcattacagccactagccatttggctatttaaatgaagtaaaattaaatgaaatttgaagttcagttttttcattggtactgaacacatatcaagttctcagtagtacatttggtcagtagtgatcattggacagtgtagattatagacatttccatcattgcagaaagttctgtgggacagtgctggtctaaactctaaatgttagatgttaaaaagccaagcaggctcccaaagtcccttctagctttagtgttgaatgattcttgtgcttctgtttgtgattttgctaaggtgttgacttatctgcacaatttgtttaagacattttattttctctgttgtcacatattgctaatcactttcaaaagaatctgttgtattaaggaagttcagattcattccctacatattttttgagctactcatgacttaaaaccttttttaaactttatagaagttttctagtcagataatttaatatatatgcaattataaacaaaagtgttgtcttcatgctagtttaaactaatttttaaaaaattatttctagataatccgcaagatgggattatggtgaaactagttgtcaatttgttgcagttatccaagatggcaataaaccacactggtgaaaaagaagttctaggtaaactacagtcatgcgctgcgtgacatttcagtcaactgcggatcacatataggacagattataatactgtatttttactgtatgttttctgttgcctgtagtattcagtatagtaacatgctatacaggtttgtagcctaggtgtgtagtaggctataccatctaggtttgtgtaagtatattctgtgatgttcacgcaatgacagaattgcccaatgacacatttctcagaacatatctgtgtcattaagcaaagcatgattgtattggcggaatgaatgtgagttatgcggtggtcatctttattatatgagtggttatctttattatatcttcaaaataagtgagggtttgtcatttgggatattggggaaatatgagatgctagctaagttacatgcctatttaattaaaatgtccctaaaaaggccccttttgtacttttcttccttaaatattcatataaaatgaaaagttagagatttacatatgtgtataacttaatttgaaaatgccttgtaaatatttaggaaagtcagaaatacttgtttttagagttaagttgcaaataaattgactgccgatatattttataaatacattataactgacaggtactcagtgtcttttgttatgtagcagacataagaatgaagacttggagggctagattaaacttaaataattaaaaaccattcaagtcctttcctacagccatttgaggggaaacctaatgtaaaataagaagccaacatcatctctagtttaggtgtttagatttagtgaccacgggatggagaaatcacctggttaaagtcagcttgaagctctcgtgatggtttttgtttctaattagaaaaataggaataagtagtgtttcacagattctactatctttcttcaacagccttaacttctcattaggagcctaatatctacagtacttccttttttgtagattttaaaaaattgagatatatcctaatatagaaaagtatacagatcaaaaatatctagcttgaagaatgtttgcagagtacgcttgtacatgtagcacccagactaaaaaacagaatcttaccagaactgtagaagttttctttaaccaacatacttacctccttgtccatagtggcactgcttttatggacagacctgatttacaacagaagccctaagtggctttcctgtgtagcataaaattaatgtggtttgttctcacagctttccccctaagatcaggaatgagacaaggctgtccactttcactactgctgttcaacagtgtactggaagttctagccagagcaattaaacaagaaaaagaaattaaaagcatgccaattagaaaggaagtaaaactatctgtatttacagacgacatgatcttatgtatggaaaatcccagagaatccacaagaaagctactgtagtgctaataaatgaatttagcaaagttgcagggtacaagatcaacacataattagtggtgtttgtatatactagcagtgcacaatccagaaagaattagaaaagcaattccatttacgatagcatctaaaagaaataaatagccaggaataaatttaatcaaagaggtgaaaaacttatatacattctgtttgttagacgtgagtcactaagtacagaccacactcaacgggagggaagttaggctctaccctttgaaagaagggctctcaaaaaatttgtgaacatattttagtaaataccatcatgatggaaagagcacgaagagccctctgggttgctgaaaatgtcctgtcttcatctggttagggagaacacaggcagaaaaaaatgtgtatttgtatgtataaattttcattgaactgtgtgtttaagattatggaatttgtgtgatacctcaacaaaaattttaacagttttaaggttgattctctctctctttttttttttttcttttgtcacccaggctagagtgcagtggtgccatcttggctcactgcagcctccgcctcctgggttcaagtgattctcctgcctcagcctcctgagtagctgggattacgggcctgcgccaccacgcctggctaattttgtatttttagtaaagatggggctttaccatgttggccaggctggtctcgaactcctgacctcaggtgatccgcccgcctctgtctcccaaagtgctgggattacagtcgtgagccaccgcactcggccttaaggttaattcttgaagtacagaaaaacagcattatagttttgaaattagaaaatttcagttttatgtatgatctcttacctatgactctactgaaatagaatttctatatgtagaggctgttggaagctgcttgggagaagtgggtcctatagatttctctaccatagctatacaacatagtaaagatgcatcttataccaaggcccttaagttatttgaagataaagaacttcagtggaccttcataatgctgacctacctgaataacacactggtagaagattggtgagtatttattgataccttatatgtaatctcaatatgacattcatggagaatgatacttcacacaaatagatattctcagtaactaaagctttgtccttttttaaatctcagtgtctttatgaaaattcttatatttttattaattcacataattatttaccctactatgtgccagacacttgatataatggtgaacattccagacaaggtccctgttaaaattttagtgggactagacaaataaacgataaataagaaaaatgccagatggttctacacagaaaattaagataggggaatataaagggagatgttttaggctcttgtcagtatcagaggtgccactctcctctaagcgaggccttattttgatccttttaaaataagtcgtaaagcagagaggttgttttataatcctagaagtcttaagctaatcagacagggtcttctattacttattctctgtgcaaagcagaattgcaccacatatcaaaatttcaactggttggttgagattacttttgcgtgcatgctctttctctctcttatttatttgttgattgattgattggtatctttgagtactccatcaccaccatatttgatggtagcctcaaagggttttcctcacaaccaggcacctttctaagataaatacgtgttttgatttttttctgtacttcccttcctccttctcttgaggaataaatgattggcaataatgtctaactgccatgtttccgttattgatttaatgtacctgtatatttctttcttttgttgttgtttttgtttcattaaacaaatttgtatggtttctttccaaacattttattataaaaagtttcaaacatacagcacaatggaaataattttatagtaaacacccatatgcttatcatatagtatctatattttatgctgtccttgcttaatcacttctagccatccgtctatccttgtgttaacatgtattaattcatctctctcttttttttttttttttttttttgagacagggtctcgctctatcacccaggctggagcgcagtggcatgataatacatcatagatcatagctgactgtaaccccaaattcttgggctcaagcagtcctcctgcctcagcctcctaatgtgcaaagtttatgtgcttgagccacaccacactcagccagttcatctcattttttaaatgtatatcaaggtatatcaagcacagtttttgaagagagtgccacagaaaatttgcgagcattaaatgtttcattcatttcatagtaattcgaaattggtttttctgaaacagatgcacagaaatattagtgtgacttcaacttaagaatactaggaagcaggtacaagttttttgtatttttctttaacagggaaaaactttagatcttcaagggactttagcatatgaagatgtggacaaaaggattcccagaatttttattacttatatgtattagaacatattattttcaagtatttcttgagtctttttaatttatagtagtcacaattaaactgtattgaatgaagggaattgcagttgcagtgattagtaattcaagtttactgaatgactagtgaaagtcctttgatacttttatttgatattggagaattttgtaaatgtaaagtttcctaatacaaattttaaattttagttttgaaattttttcagtggaggttaacattcatcaagattaataactggtgtacttgataggcatttgaattgtttttttcagtgtcaaagttcgatcagcagctgttacctgtttgaaaaacattttagccacaaagactggacatagtttctgggagatttataagatgacaacagatccaatgctggcctatctacagccttttagaacatcaagaaaaaaggtctcttaagtaataaatgtttattgaatacccagcatatctaaaacagttctgtttgctgtgggtcatgactgttaaattgcttgaaatagtattgtactaactattaacctttcctataagtaatttaagccatatttcataaatccagggaatgtgttatttttaatttattatggcagtgtggaaaagctcagataggtaacctgaggaaatagtagttgatttttgggggaggggaaattcttaaagacagaccttgtttttttagaaatagaaagcgctactttgctcccatgaaagctgttagctctgggtatggtttatagttattgtgatccacaagtgtttatttccatgtcaagttaacatatcacaatcccctggtgaaatataggaagacccatagatttctccctttttccatgttgatatcgtaataaggttccactgtaagtattctgtgaagcatgtttaagaacacttgttccttccttagtctaagcattcctctttactatcttcttttcataaagtgactgagaaatacacagtttagttttcaccaatttaatttcagggcagaaacccaacattgaagcagtactttcagtgcatcataaatataattttagtgttagtaaaattactggtaatataaactgttaatgaaactaataatataacctggaaggcattataattctaacattttaaaatctcatttcattttgaaatcaagtctctgtggtagatgtggtctagttttgttcaagagacagatgagtcagagtttgtgatttgtgtaatatgctactaatgagtgacagagctgagagtagaacctaatttttctgctgcctaaagcagcagtttttgccataccactctgcctcttgtataaacataaatgttttcatcttaaaaggtaaacattgcctccagatttagttttaactgtatttagctttattcagaaagatttgttatactcattttgtgtaggaaaggtacaatgatttccacttctcttatttacattttctaatccctttctttctagtttttagaagtacccagatttgacaaagaaaacccttttgaaggcctggatgatataaatctgtggattcctctaagtgaaaatcatgacatttggataaagacactgacttgtgcttttttggacagtggaggcacaaaatgtgaaattcttcaattattaaagccaatgtgtgaagtaagaagattaattagtctgatataattccttgtttatgacctgtttatctaaagagtgctgtgatactgcacatcatcttcacataatatcacccccactcaaactgttgtaaatttattaaagtgagcatccgtatttagtcataactttatgcattaggtttcagcttcgggatagcaacatactagaggagttctaaggggtgccttgaataatttgttactaatgatagttaaaatactgctgattataaattatttgcattaaccaagagcctgttctaactttgtttacgtcttctgataagagcacctttattttccctgatatgctttcttgaataagaaaaaggagtggggcagcaatcagcatagcttttttatttttgaggatatagtacaatttatctcaacgaagagtaaaggtacataccaaatgaaacaaagtttgtactcttccatcaaatgtgtaatctaaaacagcatactatgatgctctaagatttacagagttaatttatagcactgtcaaatgtgattcaacagaaatgtgaaaatacaacatctgatgaggtcaaacatctgctgattacagataactgatagagaagtattttcgtaatgtactcacattgaaagcaatgtaagaagcagttcttattttctacagaaaaagtagtgacagtgaataaaacatcaccttctctgcaatactacaccgcactcataccaattcagcagagtggtaccctgaacacacatacagcttatttctcattagtgaacaaagctaagatttttataaagttttacctttgagccagaaaataaaatgttccaaatatacatatgtacacaccccatttgtggtactttaaattctctagctctaaaactggtgttttgccttgtctttggtttgaaaaagaaaaagggtgcaattagtaatctataacctgtcttatgtgtgtgaagtatgatgaatatgatggatatggagtgtaatgattcattcatatgttaaatatggagtgcggtgaatagcaaaagtaaagctgaatactgttttaatgtgccagatgtattggagcacttttctgctctttggaatataccacaaataattacccaaattttatgcccagaagttgggcttattaaaaaataaacatttttaacatgactgttgtagttcttcactgaggttagaaaatgcataaaaatcagatttccaacttttgtcttaaacttttgatacctttttccctcttctatcatatcagaaaactccttctgttactaacgcttttcaactctgaaattgtatttaaagtggtgatataatttcatttgtaagcaatattctgtttcattatggtaatggcctagactggaaataaacagttacagtgtcactaacatatatatttgatattgatatactagcctagtgtggttttttaaacaccacctaatacatgttttttgtttgtttttttagcagtatgttgagtttatggcagattaatctatcatcttttagaaatttaatatgtcaacggggcatgaaaattttaagtaaaatgtattaattttactcatttttactcaaactattgggtggatttgtttgtatattctaggtgaaaactgacttttgtcagactgtacttccatacttgattcatgatattttactccaagatacaaatgaatcatggagaaatctgctttctacacatgttcagggatttttcaccagctgtcttcgacacttctcgcaaacgagccgatccacaacccctgcaaacttggattcaggtattctattaaatttttaacattaatactgtaaactcagttctagagaaagatggatttaagatggaatcccactaaaagcactttacaggattaaatctataacctctaaatttgtttcttcatctatggaatggagataaaagttgccaacagttgcaacaagttttcaatgaaataatgtgtgtaaagtgcctaggatagtacttgatgtatagtattccctcagtacattttggctattgataatgggtcaactaattgagctttcaatatgtgtcaggcactgtgcttgcactggcaatattaatgtgaaaaagaaacacccacattctagcaatggaaaaaacaaacacaatcagatattttaggtactgtggtgcagatacgatagaattttcatattttcagagctctggccaactcaatttaaaaagcagcctttggccgggcacagtggctcacgcctgtaatgccagcactttgggatgccaaggttggtggatcacttcaggtcaggagttcaagaccagcctggccaacgtggtgaaaccccgtccctactaaaaatacaaaaattagccgggcatggtggcaggcgcctataattgcagctacttgggaggctgaggcaggagaatcacttgaactcaggaggtagaggctcctgaggctcactagccaagattacaccactgcattccagactgaacgacacagcgagactgtctaaaaaaagaaaaaaaaccctttgtataactataattaacatttagtgtatatccttctaattgtttaaaacaaaaattgaactgtactttatttactcttataacctactttccttctatgacatataatgggtatttctcatgccaagagcataatagcaaaagaaattccaccaagggttgggtatgtataatacatatatgcatgcttgaaggctcattatgggtcagttttttaaacctaaattttataaaaggatacaaaattcacagatctttattgttaactgtctttattatatattattaatgtgttttatatgcaaacataaagctaggtgcaaattcacttgttgtacttaaagaccaatcaattctaatacaaatgttgatttaatgtgatattttgccacaactaatctgctcctcccaatccttccagtcacttcagcaaaggttgtgattactcagttcttccaattgtttcttttagttttactgctacaaccttcatttgacatgactctaatgtcatttagacttcagtttgctatgctttatattttatgtattttattttctgttggctaacagcaattacaaatctactatttggaaaaatataaattataaacatagacatagatgcccatcctgtgatcctactagattataggctgttctctaaatgatctagaatgtgcttatatgaattttccttaggccactgaaatgaaaatcctaaaataaaaattctcatagaggctttgtaaactatctaaaatgtatctcttatctttaattgggaaaatacaggtataagtgatttaagcatttaaaactttaatatgtaatttacagtactattaaaaacaatttttattacatagtttaaggtaatcattgtttatgataatctggtaatttgttatcatgaacatggccaagacttttttcatgtttatcacttatgtatttatgtcacaaccattggaaggtaaagtaactgttttattttatctgtatacagtgccaatatttttattaccttaagtgaaaatttaaacttcacatataaaattctgttattgaaaaggaaatacatatttttgtaaaatttaaatggtgtatcttttctgatggctataagcctcattgccttcactaaacgtcccatgtgcatctcaaactcagctgtccaaaagcaaacgtgtcatcttcttcatcccttcccccagcctacttttttaaatgtgtacctttttgacaaatggcactcagttgcttactctagaaacctctctcacgtatttcatctgattaccaaatcttgccaattccatattatgaataacttagtccatttgtttctctctgcccttagcatccttactgctttctagctccatgatttagcacagttgaaattctttcattaaattttccaagttatttcttgcttccagccatctcagatattattattattgcctgtagcactatcctttcctgctctgatgactattactcttctttcagatatcactttttcttttttcttttttttttttctttttttctcttgagacagagtctcgctgtgtcacccaggctggagtgcagtggtgcaatctcggctcactgcaacctctgcccctcaggatcaagcaattcccgtgcctcagcctcctgaatagctgggattacagatgtgtgccagcatgccctgctaatttttgtgtttttaatagagatagggtttcaccatgttggccaggctggtctcaaacttggcctcaagtgatccgtccgcatcagcctcccaaagtgctgggattacaggcatgagccattgcacttggccagtatcactttttctatgaaacttttcttgtctaggtgaggttccctctgctaagcttctgtagcattttaaactttcctattataacacttatcatattgtgttgtaatgtcccaggctagtcagtgagttctgtgtggtctgacatgatctgtcttgttcatgcttatatactgaggacctagcacataaaagatcttattgaatcaattaattagtcctcctttgaaataaaatataaattacaatgtaagttctcactttttttaagataacagtttcttttaaaagcaaaagaaatcctattaaattccttcagaaccaattttgtgttaggtactgcccaccagaaccttatagcatagtgggagacagacacataaacaagaaggaagaaggtgtgtaagcaagaatgcctgggactgaggggagatatttttgtttgtcagagtcagagcactttttccgatgctgtttggataaaaaatcacaaagaacaatgcttgctgttgtggactacatgagaagacaaaagaggtaatgtaatgagtgttgcttcttacgtttaggatctagagtgtaacttgttaactatcggctgaattttaacatgattattttaggtgaaggtgttgcaaagtgttatatttaatttgtgtgatatttatatctccttgcagtaatccatattcaggatagcagtttggttaaatcagtgtcaagaactctcaattctagtaccagctgtaccagtaaccatgttacctttgttaaattatgcagccttcttggctccaatttatttcatctatgttagggataggagcaagtgtttttccaagttacatttagctgtattacccctctttttacttttctctttgctttagttctaagaagtaaatagagttgtgtaaatgtcttctttatgtatctttattttaagatgtaagtttctttactgtgtgcagtggtctcaaaatctgtggcaatactgtgctgtgacaatgtttattttcttgtttctggtaaattgttttatagtatagtatctttgttcctgttatttctcatgagatttttaacagtgcatacagaaattgctagaatggatggtctgactgatgagtactgcttgagagttgaccagaactctgaagaaatagtgtagtaggcctataatttgaataggtaggaatcgatgtctcataagtgtgtatggtggtggtaggggtggttggtaaagaatgagagggagaggtgagtgaaaaatgaaatgtttttaagcctaaatgcattaatatcttaaaaaattaattcctatgtagtcttaaaccattcttcttctctagtagaaaaagaagttttatgcttttcagtgtctttgcttctggttattttaccttagagttttataccagattatcttctgaggaggcctatcagaagctttaatgtagtggagagcatttgttttcttggtgttgggaggcagttttacctttgagtcattcatttcagacttaccattggggtagaatggtgttgacattagcaggagttggagaagataaaaattcttcatattccattttaatgctgaataagatcctgaagaatattcctggagaaagtatgaatgggatatagaaaaacgggtaaagacatgcattcaagtccaagcttgtgctgtgtaaaaattacttgttatcctgtacagtatgttgggcaaaaacaaagaacaacaataaaacaacaacaacaaaaaaattgcttgctgtctttgaacctcagtcttatcatctttcaaaatcagaataatgtctgtagtgtcttcctttccatggggaaattatttcacttctctgaacttaacattcatcggaaaattaactttagttgagtgcttgctgtgtagtagggtgtgccttattcatcagctttgcaggcattatttaattgttgcacccattctccaaggtccatgttgttccagcatttgcaagtaaggaaactaggaaactgaggtttaagaagttaagttgctgaagatcacacagctggtagtaggcaatatagctagatttgaacctacctgtattgtacttcaacactagtgctcttaagcactaccatgtcccatctctacaatgctagttttgaaaaagatactatctatggtccctttcaatcttgacctacctattaacacagtggaagatttttattaagtaactcaacctaggcaatacattaaggagaaaataagtcacaataggaaagacatgtatttgtgtcttagatgaaacaatattttttattaaattgactgttttaaagtgtgtgttggggggtgcttgtgtgcatttgtattagctattctgtgtatcctattcttagtctgtggtacatggatttcttggtagagagcagatatgaaccccaattttgtatcaggtgatagtctacaggttttatcagattctctgataggtttgagggaaaaaagaaaaaccaaaaagattaattaaataggactcttcagccatgttatcttataatgtttataggtatatattggggaaatgtggtttttgggaatttgtaattttctgttaagcagtcactaccattgtattctatatcaacatgcttttattttgatattgaagtttaaaaaagtgaatgacattatatctcatttttctttagaccttcttcaggaacaatttttaatgatgctttctggctggatttaaattatctagaagttgccaaggtagctcagtcttgtgctgctcactttacagctttactctatgcagaaatctatgcagataagaaaagtatggatgatcaagagaaaaggtaatggaatttagaatttttggtttttaaaattaatgttggcattgtctcaataagggtatatagtaaagatttattttgcctcctgttccccatttaaaagatattttagatagaaattttgttttaaagtgaaattataataaatttttaaaaaggaatatgtaattcctgttctgaaataataggaatgcttattacttaggtattataaaaatttaacagatagcaaattcctataggacagagtccatacttaattttctgtatattccccataatagccctagcattgagaacttaatttaagggtgataaatatttttcaaatgattaaattatttcctaacttcagtcagattagatttaccactaatttctaaactattcaagattcattttggatataaaatatccaaaattataatccaaaatggctataatgtgactgatttatttctgtgactaattaagtttcatttctttatctacctatatttctagtgaatttaattcgctttcctctgactgagttagaactgtcataagaatctaataaatatactcctagatcatggggaagaacaaaaaataagaaagtaagagtaaaaaataaagtaaaacactttattatcccaactgctcttttcaaatgtttgttcgtttgaaatggcctgggtctcattatttcgcccaggctgtggtgcagtggtgcgatcatagctcactgtagccttgatcttccgggctcaagtgatcctcctgcctcagcctccaagtagctgggactataggcacacaccactgcatccaactcattttttttaatttttatttttaatagagacaagatcttgctatgttgctcaggctggtcccaagctcctacgttcaagcagtcctcccacctcagcctttcaaagtgctgggattacaagcatgagccgctgcacctggtcccaaattgttttttaaagcggttatacccatttgtgtacagaaatgtagttgataaggaagtggatcggtaggaagccttatatttgaagaagggtgccaaagtataactgttcctagtttagttaaaaaagtaaagaaggttgggcacagtggctcacgcatgtaatcccagcactttgggaggccaaagtgagaggattacttgtgaccaggagactgagaccagcttgggcaacatagtgagacctcagctctactaaaaataaaaataaatcagctgggcatagtggcctgcacatgtagtcccagcaactcaggaggctgagggaggaggatcgcttgagcccaggagggagaggctgcagtgagccatgattgtgccactgcactccagcctaggcgacagagcgagaccctatctcataaacaaaaaaaaaaaaattaagaaactggaatatgtatataggtaaatattagaggcagtatcacttatgatagtatttattttatgtactagattattactgttatagacaccacagctgtcatggttttagaattgaagttacttacagaactgaatgttatatgtataaaatgcataaagttaaggccttgaagtaggcaaatctgagttctaatcctgactgtcaaactttctagttttatagtcttggtttaagtggatcctactgatctacttccttttcaatagttaatatcagatgtcttaaatttatatctgttaagtattaaattctgtcttattgtggtctttatttgtgtgtctgtaattattgattgggttgaatttcaggtgaaaccactgacagagtatatagtacctgaattggatggcatctgctctatttttaaacaatccaatctctttataaataatcatatttttgcatataggcttcccatatgtagattattcttaaaatataattttcattcacaaattccttttccatcctaggtataaatggtattatgttttaaagtataagtgatttattctgttttgtttgccaccttcattagtttttttctgtcaaagtctatagtatatgtattcaggagcttccaaatagtatgttctcattaaaagaggtgttcttgtgacaaacagaagtcttgcatttgaagaaggaagccagaatacaactatttctagcttgagtgaaaaaagtaaagaagaaactggaataagtttacaggtaaatattagaggctctattatttatgacagtatttatctcatactttgggttattttgttatagacactgtacagatgccatgtgatttttaaactgaatttacttactggactaagcatcatatatataaaattatggtctgaagcttaagccttagagtagacagacttgagttctaatactgactctgccacttcttgagttccttatctgaaagacgaaggtaaaaccacctgtctcagagtttatgccatgcattttctgccatagcaccctgttcatttcctttatagcacttagggtttataattatatatttatttgtttgcttgtttattgtatgttacagaagaagcagattgcctcttctataaatttcttgatatccattcttaaattggctcatgttactgtctgggatgcttgccgaatttctttggtcaactcattcctccacaatgacaatttcagcttctccattctgcttaaacctctcatcttctcttctatgccgctgctttcagcctgcctcctacttggagaaaatagaaggcatagagaggaaatctcgccacatcccactctcaaacattgaaatctcctggcatctcctcctttaataatcttccgtcatgttacagaaacagtttatccttctatttgagactaattcttcctgtgctttgtttttttatctgctctttctcaggtgctttattttttaatatgctgttctccctctgaactatgttctgaacattttaaaacctctcctgtttaaaaattccctttctcacaaagacaaaataatttccctcttccctatgttctcttttaggtatcaccctctctcttccttcctctcacagacaaactttgtgaaagagttgtccatatttgctgtctgcatttcccccccttccatttattccagtaaaatagcacttgctaatgtctctcataaacttcatgttgctaagtctggtggtcacctttcattcttccttttccttaatgttttattaatacttcacatcatcaaccatgccttgcttgaactgtgttctgtttacctttttgatccactctcctgatttttctcctttcacttttgccttcttcataggctcctcctctctactgagtttttggaatatcgtgtgtgtactaagcactgtgctaagcatgggtactgaacttttctactctgaggacttgatttcacgttatgaatagaaacatttgagttggaactatagaattatgccaatataaatgaatttgtgtgtagaaaatatttcacagagcaagcaccatataggcagttcaattgcttgatcaattttctatgcagtatagttcctagttttttctattttattttttttatgttttcatttttatttaactgagattgttttaaacagaatatatcttttctgtgtaaattttacaacaaagatttcagtaaccaaactactttatccatatcaaattttaccaattccaatacagttttgtgctatttttcaaagaaaaatccacgacctttattcttaccaaattgagttttcaagagtcagactttgtaggactgtattttctaatgtacagtttttttgtttttttttccagacaggatctggctctgttgcccaggctggagtgcagtggtgcagtcataacacactgcaagctctgcctcccaggctcaagccatcctccaacctcagcctcacaagtagctgggactacaggcatgccccaccatctccagctaatttttgtagagatgggtttagccatgttgcccaggccgatcttgaattcctgagctcaagcagtctgcctgccttggctacccaaagtactgggattaaagatgtgagccactgcacccagcccatgtacagttttaggtgttgacaagattgtttggttttgtttgtgtgatttttttttttttatgtgatataagcctggtaggtcggtacttatttcttatctaattcatgaaattgtaggcaattcttctcgggtagactacagtcctcctgttgtctaggaccagtctactgtgttgctgatccaaatcattagtatatacagttgacccttgaacagtgtaagggttagaggtgctaaccccctgtgctattaaaaatcagggtaaaactaaattagtagtcaaaagttaactactaatagtctactgttgaccagaagccctaccgatgatataaacaacacaattttgtatatgtattatatactgtattcttaaataaagtagcttgagaaaagaaaatgttattgagaaaatgataaggaagagaaaatgcatttacagaactgtactgtgtttatcaataccgtaagtttatatcatctgtttacaaagaatcatctgtctgaaattgtaggcaaccactgctggttgatatgtactttaggcctcaatctacagaatgtatcaaacaattcacctttttcttgtaatggcatgacttttctctgcatcttggaagcacctccagccactgtggtgttaatcaaggcttatagtattgcagtaaacacagtgaaaaaatacatgagaacctggagagattacttttcatttctggatacaatttactagagaaatgaactgctcatgtggaaattattagtgtcacatggcattttaagcagatactcacaacacaataatgcttaccacagtagcaactgaggtagctgcaaaattattacaatagtacaatatgtacgatagttaatcttatgcaattatgatttaatactgcatctttacatttgtttatatttgtcttaaccacaaataatgctgtgtacagtgtgtgtgtgtaagttttgataaattttaactctttgtaatagatttgtgtatattttatggtagtaaatgatgaaatgtatcatatcaaatgtatacaaatgatggaatgtgtagactagttgtacatttattttatgcattcatgacataacttttaaaaaatttttcagtagttctaaactgtgtggtttgtgaattttttcaaattgtggcaaacctccaaaaagttttcaatatatttattgaaaaaaaaatccacatataagttgtcctgcacagttcaaactcgtgttgtttgaactgtatttcagaactgtatttcagaatcattacattttatttctataacataacatttagagttgggagttacatattggtaatgatacaatttaaaatttgctaaatttatagaccgattttttttccttcttcaatttttgttgtttccatgttttcaggatcttctcttagaaatctacagaagtataggggagccagatagtttgtatggctgtggtggagggaagatgttacaacccattactaggtaaattgcatttttctaaacaacggtatagtaattctgtttatgaaggagttatgtgtgtgtaaaacccaaagctattttcacaatcttttcttatagactacgaacatatgaacacgaagcaatgtggggcaaagccctagtaacatatgacctcgaaacagcaatcccctcatcaacacgccaggcaggaatcattcaggtacattttttcccagatttggtaaagccatcactagtgtagtgctgaggttatttcagtatgttggtggatatttacacagccagataaactctagagataagactagaacttatctgtttttcagaggattaggctaaacattcagggatactcctgaagcagagggatgcaaaaaaaagagaaaaaattcagggagacacaggaaagtcagacaggtcattgacctaaaagatagtgtagatttcttgatcatagtgttgttggataacaacagaagacattgctcgagcatatacaatgtgccaggtagtgtacttactgcttcacatggaaaatcttatgtaaactatttctcatagtttgcaacagagttggtcccagaacctgttgtttctattactggctaatactccttagccattcttccatgaaatattagagccctttgagctctatttttgtgttttttgggaaacattaaacgatattttgggattaaaaaaatgtttttggccaggcgtggtggcttgcgcctgtaatcccagcactttgggaggccgaggcgagcagatcacgaggtcaggaggtccagaccatcctggctaacacggtgaaaccccgtctctactaaaaatacaaaaaaaaaaaaaaaaaaaaaaattagccgggtgtggtggcgggtgcctgtaggcccagctacttgggaggctgaggcaggagaatggcgtgaacctgggaggcagaggttgcagtgagccgagatcgcgccactgcactccagcctgggcaatagagcgagactccatctcaaaaataaataaataaataaattttagagataaggtgtcaccctgttactgatgctggagtgcattagcgtgatcatagttcactgcagccttgacctccctggctcaagggcacctctcgcttcagccacccaagtagctggggctacaggtacacactaccatacccagctattttaaaaaaaaaaaaaaattgtagagacaggtcttggtttgttgtccaggctggtctcaaactcctgggctcaagtgatcctcctgcctcagcctcccaaagtgctgagattacaggcatgagccaccacacccagctgatattttgggattttaaatgatattgtgaactaaaatttgtctaagttaatttgtatctttgctgtttttttctctggttttctgttgatatctttgattacttaacttaaaaacaaaataactcctgtttaggccttgcagaatttgggactctgccatattctttccgtctatttaaaaggattggattatgaaaataaagactggtgtcctgaactagaagaacttcattaccaagcagcatggaggaatatgcagtgggaccattgcacttccgtcaggtaagaaatttgacttgatttttttttttttgcctctctcctcattctaaacaacaactgtttttctcttctatgaatataacaggagttgttttatatatatatatatatatatatatatatatatatatacacacacacacacacacacactatatatatatacataccatatatatagtgtgtatgtgtgtatatatatataaaaaaatatatagtagatgttgcaagctatagatagccctaaatccttcagtaagatagcaataagcagttaatgcacctaggcttgaattttactctcttattccattaggacaacttcaccccacccctaaatatttctaaaaacagaaatatgaaaagggttttcgaaatgagtatcatctcgcatagtttgttggactgaggcatgccaagaaaagtataggcattcctctttctacttcctgctacaaacattttagtcagtaagatagcacttatattggctggaggatccacaaaggactgcttatctttatttatgaaatattttcttttattaaaaaataatacggccaggcacggtggctcatgcctataatcctagcactttgggaggccaaggcgggtggatcgcctgagctcaggagtttgagaccagcctgggaaacacggtgaaaccctttctctactaaaatacaaaaaattagccaggcgtggcagcatgcgcctgtagtcccagctacttgggagcctgaggcaggagaattgctagaacacgggagacggaggttgcagtgagctgagatagcaccactgcactccagcctggacaacagagcgagactctgtctctaaaaaaataaataaaataaaaaaaataatatgcctactcagggctgggcacagtgtggtggctcacacctgtaatcccagcacttggagagctgaggcagatggatcacttgagatcaggagtttgagaccagccgggccaacatggtgaaactccatctctactaaaaatgcaaaaattagctgggtgtgctggagcatgcctgtaatccaagctactcgggaggctgaggcaggagaatgcttgaacttgggaagcagaggttgcagtgagccaagattgcaccactgcaccccagcctgggcgacagagtgagactctgtctcaaaaaaacaaaaaaaacactcagttacccaggaagataacatttataatctgtatataaggtcaccatgttttctgaatgaaaagccaagcacctaatctaataaaggatttcatatttatgtaaagttttttgataatgtaaaccctaaaaaattaattatgtttaagtatgttttgttgcctttgtagaaaaaaaaaattattggccgagcgcggtggctcatgcctataatcccagcactttggaaggctgaggagggtggatcacatgaggttaggaattcaagacaagcttgggcaacatggtgaaaccccatctctacaaaaaaatacaaaagttagctgggcaaggtagcatgcatctgtagtcccagctgcttgggaggctgaggtgaggggatcccttgagcccaggaggtggaggttgcagtgagccgagatcatgccactgcactccatcctaggcaacagagtgagactctgtctcaaaaaataataattattggaatgcctttcaaatatttcagactgtaagactgctataaaattagagatatatcctcatattttaaaaaccttttcctgtgcgagttgattcttgcttgcctctgtaaatcaatatatactattcttctccttcctcttgtatttcagctacacagacctctctgtgttttcttgtcaggccaagctgtttctatccaagggccttagatgtatcttctccttttcccccagttaccatgcgggtggcttcttttcattcggaccctagttaaataataatgtatcttcagagaggcctttcttgattacccattctataatagccatctagccattttgttttgttaccctgttttaattctctgcatgtcccttgttactttccaatacttatttattgtctgttcctccaaaccagcacataaattccatgagagtaaagacctgatctgacttgtccacttgtgaattccccttgtgcctagtgcctggcacataataggtatttattgaataaataaatgaaagtagagcatatttagaaccaggcagagtatctgagtaatttcctttttttctgcttaaagaatttaaatgactcataaaatttgtatttcttaccaaaaattctagaaatgcattttttagaatggagaaatgttaatttaaaaattttgtcctttggtgaagctatttatacatgtatatcttagggttctgtttttaagtatatttttttctttgacttatctcacagcaaagaagtagaaggaaccagttaccatgaatcattgtacaatgctctacaatctctaagagacagagaattctctacattttatgaaagtctcaaatatgccaggtattatgaaaagacaaagttactgtattttaacatttaatgtcatggcttcttttctgaaaacttgagaaacaattttaatgtaaggatttgcattgatgaagagataaagacttggtggctgtgatcagatgtttccttgtaattctctgccctccttcaaaacaaattgtttctgggattccaggttcattctttaccctgacccttcaagaaagttttggtgattccctctttgttctcttcctatacaagtatcctgagaattatatcttgtctcttttggtaattgtatggcatttagtgttctaatttataaaattgtaactcacggttaatacttacaaacttgttttgaggcacaaatgtgatgaggcatgaggaaataattataatggggtaaacaaatgcagcatttttaaagccgtagtgacttaataaatcctatgtttatcacagaaataaaatttactatcatttaagtgcctatgatatgctagccactgttagactcttttcatatgtattctctaatcatgacaataactatggatgtgaaaaaaggcttagagaagtccagtaacatgcccaaagttacacagctataagtgacagaactgcaatttagatctaggtctgtgtgattccaaggtttacagttgatccttgaaccacttggaggttaggagtgctgagcccctcctcctcacacatttgaaaatgtgagtattactttgactcctcaaaagcttaactactaatagcttactgttaaccagaagccttaccaataacataagcagtagattaacacatattttgtataagtattataataccatattcttacaataaagtaagctagagaaaagaaaatgttattgaaaattataaggaagagaacatatatttactagtaagtggaagtgggtcatcataaaggtcttcatccttgccaccttcatgttgagtaggataaggaggaagggttggtcttgctatctcaggggtggcaaggtgggagaaactctgagtgtaagtggaccatgcatttaaatttgtgttgttcaagggtcagttgtattttgtttccactgctattttgtattcactgttgcttgttagtattattagatcagtagcaaagcctatgatgagaactctttaacaacaaatttaaacatttatttccctgaaaacctcttctttattttcagagtgtcttttcttttttgctactagagtaaaagaagtggaagagatgtgtaagcgcagccttgagtctgtgtattcgctctatcccacacttagcaggttgcaggccattggagagctggaaagcattggggagcttttctcaaggtatgtaattcgtatgactttgttatcctaaagtgcagcttttctgttaccaatagtgactttaaaaaataaaaactataggccgggcacggtggctcatgcctgtaatcctagcactttagaaggctgaagtgggtggatcacttgaggtcaggagttcaagaccagcctggccaacatggtgaaaccctatctctactaaaaatacaaaaattagccaggtatggtggtgggcgcctgtaatctcagctattcaggaggctgaggcaggaaaattgcttgaacccagcacaacaggcagaggttgtggtgagccgagattgcgccatggattccagcctgggcaacagagcgagactctgtctcaaaaaaaaaaaaaactatgtagagaccaaatgtgtgtgtttctttccttttatcaagatataagttgattagccctagtgaattgtgcttttattaaacattttccaaaatagtcattgtaaaaatttaagttttaaaaattcagcttaagtgtgcttttctctttataactttttccctggcctaccaagataaaattgtttcctcatgtttttgcatagcatgataacactccattcagttttagcactacattgtattactgtcattttatctctgccttgctaaactagaagctcccttaaaagtgggaaccattctattgtttattgttgtatacctagtgtttttgttttgttttcttttttttctttttatgtttttttgagaccaagtctcgctctgttgcccaggctggagtgtcatggtataatctcagctcactgcagtctccacctcccaggttcaagcgattctcctgcctcagcctcccgagtagctgggattataggtgccccgacaatgcctggctaatttttctacttttaatagagacggggtttcgccttgttggtcagcctggcctcgaactcctgacctcaggtgatccacccgcttcagcctcccaaagtgctgggattgcaggcgttagccaccatgcccggcccccaatgttttctcttctggtgactgataattatgtttagtaaacattcagtggatagtggatgtcagttaatttgtaaaaggtgttcagaaggaattgcttcttataatggtgagagggaaatgatccagggattttggaagatgaaatagtatagttactcaggatgctgtagatctaaattctttccttttatcaagatataagttgattagccctagagaattgtgcttttattaaacattttccaaaatagtcactgtaaaaattcaagtttaaaaaattcagcttaaaagtgcttttctctttataactttttccctggcccacccagataaaattgtttcctcatgtttttgcacagcatgttacactccattcggttttagcactgcattgcattactgtcattttatctctgccttgctactagataaaagaagtggaagagttgtgtaagggcagccttgagtctggcaggatgacaaagtaaagtgttttgggtcctcagtttcctcatttctaaagtcagggatttgtattcgatggtctctaaagccccttttagccctgctattttgaattactattattattatacgagggaagaaagaggatataaatgactaaggtcactctacctttatgcaaaaataaaatttggaatatgttttggaagtagaaaagagaaggaaattttagagtcagaagaaaataataatagttttttcaaaatgacatagcagaagacatacatattaatgtggcttaggaggaaaataaaggaacaaaagtcttttctgctttcattcataagtacattggcagtacttactgccagaaatcaagaaatttttcctctgaatgaaagattatcctgctgaaaagagtacagaattctttaagaaacagtgaatagaatggtagtaaccagaggcagggaagggtgttgtggagggagaggatgaagaggggctggttaatgagtgaaaaaacacaggtaaatagaagaaataagatctagtgtttgatagcacaatagggcaactgtagttaacagtaatttactgtatatttttaaatagctacaaaagaagatttggaatgtttccaacacaaatgataaatgtttgagatcatggatatctcaattacccaaatttgatcattacacattgtatgcttgtatcaaaatatcacacgtacctcataaatatgtacaactattatgtatccataaaaattaaaaataaattttaaaaagaaacacctaaagaataatctggctgtttctttggtagagaaataggaagaagagaagcagagggaaggttggatgaactggtgcacaaatgcttatgctctcagattacattccattcatatacatcaaccaaaacattaaataataacaaactaaatgcagaagcagagataagaattcatctcgttctgttaatccagacattaaagagatttgcaaaaatgcaaaacagtgccatgctcactaagttttgttttgttttgggaagtatacagttgaaattctttatctacaggtttccatctatggattcaaccaaccgcagatcaaaaatatttgaaaaaaaaattttaaagaatagggtataacacttatttacatagcatttacattatagtaggtataatatgtaattagagatttatgtataacctgtgcacattctcctattacacgtaatctagaggttatgtgtaatactttttggaaatgtttaataaaagcacaatctagaggttacgtgtaataggaaaatgccctgccattttaaataagggactttgaacatcagcattatcaaggtgtcttggaaccaattttctgcagatacagagaaactactgtagttatttttcctaaaaattgttatttatgatatatagtagatttattatttttgaataaattaatacattttagatttttctcagtctttctaatatgatatcatatctaatatcagtagatatggtccaacgatcgaaagttctttggggtcttcaataatttgtttgattgtaaaggagttccgcaaaaagtttgagacctgctgtggtagggtcatttagagaggaattgaagttttggttcctagcatttttgttactgttccttccctatcaagcaactaaaagagctttcatttcttagtcatcactttgtcatcttactctccctgcttcctctttcttatttctttcaataaatgtccctgaaggattgggtagtatttcatagttcagttatttgggaaggatactattcatataaactaattgtgcaatatgccttttctgttcctttaataatgttggtaaatgaaacctttgccagatgccagcttttccttcactggattgtgatttttttgacagctataattatgcatcaagtcatccccagtagggggtccctcatttccttgctgacatgtcctcattactacaggcagtattgaagcaggactaaagatggaggcattctttatgataggtctgatgaatatgttcttgtttcagaagagtatttagaagggctgctttttgtaatgtcagagtattaaaaattttttttgatgtttgtcatctgtgacctctctgctaataactcttaagagctctgaccgcatagcattttgtagttttctaaattttgatccatatgtaggattatttacaagttctagtcttgtcactacaaaagttcctttgtattattataatattatatcgtaagttccagaacttacatagtttttttttttttttttttcatttctcttgcttacatgaactctatgtcgtggcattcagatcagtcacacatagacaactctctgaagtatatattaagtggcagaaacactcccagcttctcaaggacagtgattttagttttcaggagcctatcatggctctacgcacagtcattttggagatcctgatggaaaaggaaatggacaactcacaaagagaatgtattaaggacattctcaccaaacaccttgtagaactctctatactggccagaactttcaagaacactcaggtaaatacaatttaaaactatgtcatcttacctcttgactttccttttattatttaaaaaacagaaagcctgagggaaaaagaaatgtcattaagagatagagatctctattaatatatagtaaaaataattgtttaagagttcccattttggaattagatctgacttttaagccttgggcaagggtacttaatcttttctcaacctcaatttcctggttataaaatgagaagatacgtaacttactatattgataacaattcagtgattttatatactgtgtgtatgtacacacagatacacatacatacatatagagagagacagacagacagacagataggcagacgtggggtggggagatgtcatgcagacagagaggtccttaagatagtccctgacaagtagttaagtcctcaatgaatggtagttgctgctttcattattattattattcatggtagtagtatcagtagtaaaagtatttattcccatatgtcattttcatttcagctccctgaaagggcaatatttcaaattaaacagtacaattcagttagctgtggagtctctgagtggcagctggaagaagcacaagtattctgggcaaaaaaggagcagagtcttgccctgagtattctcaagcaaatgatcaagaagttggatgccagctgtgcagcggtttgttttttttattggctggattagtgttttactgttatttaaaaaaacacaaatgtactttaaaatatttttaataacaattttattagagccttgaaattagtaatttattaacaagatattgtaaaactagtcttgaaaattaatttgtaaatgaagtttagaaactttttcctatatatcacaattctatcagtccatcatgtggtcgattcatttaatatatcccagtattaagcctttaacttcctatagaattcaagaaaggtatgtgggaaatgaatgaaatagctactctaaatttgaaatgacaagtgaaaaaagggaagaggaaatgaatgagagaactaaattagaaaataaaagcaagttgggacaattaggttgtcaatccaaatgctttgaaaatatcacatctaatattttatctaacattacctgttggtttttgcaaacttatgttgctacttcagctgtaaacccagcatacacactggataaagtagaggcattggtgtccccaaggtttgtctacagtggtgtcccacagacatgtacctgcttagtgaatatcagctcactgtgctttattatttatttatttatttattttttgagacggagtcttgctctgtcacccaggctggagtgcagtggtacgacatcggctcaccgcaacctccacctccctggttcaagcaattcccctgcctcagcctcccttgtagctgggattacaggcacatgccaccatgcccagctaatttttttgtatttttagtagagatggggtttcaccatgttggcaagactggtctcgaactcctgagctcaggcaatctacccgccttgtcctctgaaagtgctgggattacaggcgtgagccaccacgcccggcctttactgtactttttgatgttgggcactcattgtatagcatcttctgttattagagaaatcattataccaaagcactgagtgccaatatgatatgtgtaaatattgcttaatagtattggccctgaagtatgtgctgtctggagttacccaacttccttgtacctcagttttctaatctgcaaattggggtaataatagtacttatttaataggattcttgtgagaattaaatgagttaatatatataaagcctttacaaagtgtctgacatatataagtactcaataaatgtgacttgctccaataatggcaataataataataaacagaggatgatcatttcctacatgggattattaaaatagttgtatggcaaaagcagatgaggaaaaactttttttttcccacccaccaaggaaaaacatttttaacctgcttttttccccgtacatgaagggcagttgggtacagtcatggtaatgcattatattttaagattttgcctttcttatacagaacaatcccagcctaaaacttacatacacagaatgtctgagggtttgtggcaactggttagcagaaacgtgcttagaaaatcctgcggtcatcatgcagacctatctagaaaaggtaagatttttggagcaacccttaagatagttacttagcatgaatatgcttcatcttttcatcaagatcaatatatttccaaagcaaataaaagtatggttttatttttctatatattattactgttgtagctctgtatagtctctagggtggagtgaaacattgttacaaaacaaagcagccaattttgaaagtaagcccaagtatagtatctcttcttcctccttcctacctccactaccagctaccctttcagcaggttgcttctgatcatttcttcatttatgcatctacaaaaataactgattaagaataggcaagtcagcccttgctcttcattagcccagccacccacaagtaaaggcttcaatatactagcccctttgactttcctgtttctccctcttattcctttagattcactaattttggaaatagttacctcactaaataagtgtaacatgaaacacatgatgcgattgtctttcttttcttttcttttctttgagatgaagtctctctctgtcgcccaagctggagtgcagtggcgcaatctcggctcactgcaacctctgcctcctgggttcaagcgattctcctgcctcagcttcccaagtagctgggactacaggagtgtgccaccacacccggctaatattttttatttttagtagagacggtttcgccacattggccagtctggtctcgaactcctgacctcaagtgatccacctgcctcggcctcccaaagtgctggcattacaggcttgagccaccacacccagcctgattgtctttaaattttataaagttctctgtttttgcagagttctttacaagtattagctgtctgggttatttctacactgtcaaagttgttttgaaaagtcaagaaaataccatagttcagggctgtccaatcttttggcttccctgggccacattgcaagaagaattgccttgggccacacataaaatatactaacattaatgatagctaatgagcttaaaaaaaatcacaaaagaaatctcataatgttttaagaaaatgtacgaatttgtgttgggccacattcaaagccgtcctgggccacatgcggcccatgggccgtgggttggacaagtttgcaatagttcatataatttagctagcttttatatgtatataagttaaattttagtgtattaccttaatttgagtgattctttagatgtatttagtatttgtaaatataatttaaattggttgtgttttcttgaaggcagtagaagttgctggaaattatgatggagaaagtagtgatgagctaagaaatggaaaaatgaaggcatttctctcattagcccggttttcagatactcaataccaaagaattgaaaactacatgaaatcatcggaatttgaaaacaagcaagctctcctgaaaagagccaaagaggaagtaggtctccttagggaacataaaattcagacaaacaggtaactaggtttctacaagtgacaattttatgttcaccagttaactgagtgagtgtttttgcatagaaagagtgacttggtctttttatctgatatagttttgagctctaaaggtcggcttaactatatatagattatcttggtcttttgggttcttttcggtttttgttttttgtttttttttttgagacaaggtctcactctgtcacccaggctggagtacagtggcgtgatcactgtactccagctcactgcaacctcgacctcctggactcaattgattctccccctgagcccccgaaatagctggggctacaggtgcacgccatacctggctaatttttgtattttttgtagagatggggttttgccatgttgcccaggttggtctcaaactcatgggctcaaacgatctgcccaccttggccgcccaaagtgctgggattacaggtgtgaggcactgtgccctgtctgtcttggtcctactgtagttaatcacaaattagtatgtaagatattgacgtgttcttttgtgaataattcatgctctgcttctaagttcattgtggagaatatagatattagctttctgttttgcttttttggtttgtttgttggtatcatagtggaaaaggagatagatattgaaattaattacaaaagttacctattttgatgtaattaaatccctttatttaagcctgtcttgaatctgtatattttagtgtaagcagaggtgtaagttagctaaatagcttggggagagtcccctttgtcctttgatgcttaggaaggtgtgtgaattgcacagttaagacaaaagtaagtttattccctttataatccttagaagtttgcttttttccctgggataaaaacccaacttttttcattaaatgttgtatatcatgtgtgattttgtagttctgttaaagttcatggcttttgtgttttaccttaattattctatgcaagatacacagtaaaggttcagcgagagctggagttggatgaattagccctgcgtgcactgaaagaggatcgtaaacgcttcttatgtaaagcagttgaaaattatatcaactgcttattaagtggagaagaacatgatatgtgggtattccgactttgttccctctggcttgaaaattctggagtttctgaagtcaatggcatgatgaaggcaagtgttactcagcccaatattctaccctgtgcttgaaaaacttagacataagccccttgatgtcaggaatcgtgtatacctctttgtattcctagcacttggtccagtgctctacacataagtagcattttgtagttttctaaactttgatccatatttaggattatttacaagttctagtcttgtttctacaaaagttcctttgtattatataagctgacaagctgtaaatgatgcaagtttgtgtggaggtgatagaatttagcttggtcctatgtctttgcagttaccataggagagggtctagaatggggcattagattggaggatttagaaagcagttaaagatgatgtgatcacaggtgggttttccccctgctgcagaaatatgggatttttacaataaattacttttgtaagtagagaaaatatatttttcagaaaatgtcaagacagcagtattgtataagtttttctttgaaaaccttagattatagtgatgacacctaatattaaatttaagttgacaagctatatattgttagtcaatttgaaggttagagataaaatgtttctcctgcaggaaaataataagactcataatagatacagtcaatctctgctgtagtatacactaaatattacttttggcctatggggaaaagcaattacttcattttattgtacactgacttctcaggaatcaagatcacagtcacactcagatcacatttgtcttccttagattttttggaatataaacagtaccaagtattctagttctgaatccagtttaatttaggaccaaatattttgatttaccaatgcattaatctagagtacccattagaaagaccttcagataagaaaagaaatgaaggaaaacaatatagttagtgaagttttgttaaccacttgtgctaatagaggagcactgtcttaaaataacttacttgcttagatgtgagaatatttgaaataccttgtttcttaattttgtgtcttttttttaatggtagagagacggaatgaagattccaacatataaatttttgcctcttatgtaccaattggctgctagaatggggaccaagatgatgggaggcctaggatttcatgaagtcctcaataatgtaagtaaacctgaaaatcaaaccacaataattatttttattctattattactatatattatataaagtatatataccattccctctaagaaatggaaatacaaaattttgtattttttgtcttctcacatcacataagttactcattttctctctctaattcctcataggcctctgcctttttctcacacatgcaggcatacacgctctacccactgcagtatctagacagtaatacacattttaatgttaagcaaaatgaaaaatatggattatatttttttgtttatttgcataaatctaatagttcttttcttacagctaatctctagaatttcaatggatcacccccatcacactttgtttattatactggccttagcaaatgcaaacagagatgaatttctgactaaaccagaggtagccagaagaagcagaataactaaaaatgtgcctaaacaaagctctcagcttgatgaggtatttggattaaacatacgtaccttttagaagtgtgatattcagtctttcctagaatatttctttttaaaatcttgtgttattaagatgccatctaaaatcggttcaaggctggcacggtggctcacgcctgtaatcccagcactttgggaggctgaggcgggtggattacttgaggtcagaagttcgagaccatcctggctgaccgacacagcaaaaccctgtctctactaaaaatgcaaaaaacagctgggcatggtggtgggcacctgtagtcccagctactcgggaggctgaggcaggagaatcacttgaactcgggaggcggaggttgcagtgagccaaggttgcgccattgcactccagcctgggcaacaagagcgaaactctgtctcaaattaattaattaattaattaattaaaattggttcaaaattccttaatatttgtcaaagcataggagataccagtagtagtttacttttttcctcaaagcagttggcaaagtgaaacaatagattttgaaaggcacctaagtcattgacgagagtatgtatctttgatgtatttcatttatgactgttttgtttgtatctgaggaattataatcattccattgtctagatttgtgcataaattctgtttttctctttgtttttctaactctgagaagtttaaatgttgggtagttccttatgtaatgttttttgttttttattaataggatcgaacagaggctgcaaatagaataatatgtactatcagaagtaggagacctcagatggtcagaagtgttgaggcactttgtgatgcttatattatattagcaaacttagatgccactcagtggaagactcagagaagtatgttttttttaaagaagaaacgttactttcttgctgtgttactctctgtagagatatattagttatagagcctaataagtaaatctgcttaaaatcacaaacgtaatccaaaagcttaatttatatctgatggcttcagcattccctggttactttttcacttaatatctcttaatagaactggtaataggtgactacactaaattaattatttgatttcttctgataatcttctggcatacatacttattacagagaattgcataatagaggcaagtctattaaaataattgaataactgaacatttctagcctcaaaagtttttttaaacgatgtggttactaaaactgccctgggacttaaaaacaaaaaaaggctttaccatttcttccataggtgctaaaatgccattatttaattattattcttgctgtgtcagttcaaataattacaagctgctatataatctttggttttgtgactagtctctaagtatgcttctaagtatctccccatactttaataattgtatttttttctattcagaatcatatcttcaagtttaaattcttattacttgaaaacgaatgggacttcacatattgtttctctaagcaaacaaaaagtattgacatgtcttttagttgcatttaatggtaatgtgacaggagtatgttatctatgtactatgcaaactattacgtaattattttaagatgtttagtctggttcctcaggtggaatctggtctagttacccttgtcaggtaacctgcaaatttacttgaagctacattaaccactgttgagctttgactctgagctgcatagtggccaaagcccagagtcttcatttctcaatcagagcctgaaccacagattagcaacaagttggggccagtggtatctgctgactattcctgcttgaccttcaatgctgttcctcagtttgtcactaaaatctcttcatttttaaatacagaaggcataaatattccagcagaccagccaattactaaacttaagaatttagaagatgttgttgtccctactatggaaattaaggtaatttgcaattaactcttgattttttttaaactaaattttttttattagattgaaccatttgaaatagtatttttatgtaggtcaaaattggttaaatattggcaaatttcatatgtttcaacctataatttctcagtattatatttcctttgcccaagccctaaaatactcaaaagcttctcctgctttcttttccattgccttctgttctacacctcccatctttcttatgaaggtctatagactgttactttcattggccagaaggagagtttccgtgtgcttatgccaagattaatttttgacttggcaaggaaggttccaattgtcatatattgtttttaaaaattctatgtgcagtaaaatgtattggctgtgatatatcacagtattaagtaatatagtatgtattattataatattaagctgacttcatatgcatgatacacttagctctgttctaatattcttttattgcaagaaataatggaagtaatttcatgtgggcagggatatatgtaataagggttataagtttagaaaatgatcatcttaaatacattgtctttcttttcattttgcagtttagtgcttagtatctagttacttgatttgaaatgtagctgtatcatgtggattaactgctgtttttctagctatatcagctaggtgatttcgctgaatgtttccttaaaatgccagatttagcagttataacccagaaaactccttctactgttttccaaaatttactttatgttttcgtgaggagttatttctcagatgactttacatatattagtgaatctttgatgaaacagtagttaaagttacgagcgtgagccaccacacccggcctaaagttgtagttcttaaccactatcacatcgtcatttgtttctctgtttaatattaaaattgccatttataatgtatttttctttaagtgcaaatagtgtatctgacctattatcaatcatgtttatacttttattaggtggaccacacaggagaatatggaaatctggtgactatacagtcatttaaagcagaatttcgcttagcaggaggtgtaaatttaccaaaaataatagattgtgtaggttccgatggcaaggagaggagacagcttgttaaggtgagccttcccttctctggcttagcccttagagttttagtgatgaaaatttttagttcatattttctttctgctttatttgggattttgtctttattttgaatacttacaaatgaggaagatttgtagagtagaaatgcattattttctagaaccaggcttttctccattttttttgtgtctctgaaagacaatcattattatatggttgattcaagtaaaagaataccattaacatgtacagacatgtacagtgaggttgcttcttatgaaaaaaaatactttggtgtctgtctcttatttccttgaatagtgcaagttgacgtcctttgcatcagtataccgggtctcgtactgtgccaagtgctatttaatgtaccaaaaagggagagcattcttcccttaccatttgctgacgagctctttgggtcctactggggagtggtggaaagacacagtgctgttttactcaggtgtttgcagtatgccttcctaggggggacttccagttaatctaattacagaagtagcgaggggaaactttctaaatcagtgtaaatgttgtagcttattctaaatgaaagaatggcagtaggtatttaattatttgggagactgtcaagaggtgcacagatgctcagattggtttgagtgccctttgctattctcagatgactctgtgtttttataataaaataaactgtacttgtttattcatgcttaattattctgaagggccgtgatgacctgagacaagatgctgtcatgcaacaggtcttccagatgtgtaatacattactgcagagaaacacggaaactaggaagaggaaattaactatctgtacttataaggtaactatttgtacttctgttagttcaccaaaaacatataaaagatgccatttggttgggtgaagtggctcatgcccatattcataatgctttgggaggccaaggtgggaggattgcttgaggccaggagttcgagaccagcctcagcaacatagtgagaccccatcttgacaaaaagttaaaaaaaaaaaaaaagccagagatgatggcatgtgcttgtagtcccttagctacatgggaggctgaggtgggaggatcacttgagtccaggagtttgaggctgcagtgagctcaaactctgcagtgagccccagtccagcctgagcaacacagcaagatcccgtttaaaaaagaagaagaagaagaagatgccattatttggaccaggagtctacaaatgttttctgtgaaggaccaaataataaagatttattttctttgtaaaaagtatttattaatgttaattatagttaggtgtttcttatagtcaactgaagtattttttccttttttttctactcaacaatatgtcacagaaatctttctcattttttaacagctgcattgtgtgtatgtatgtagttttttatacaagtccttatcgatgggcatttgtgttgttttcagtcttttgctgctacaaacaacgctgtattgtagtgaataaccttgaacatacaaatttcatacatgcgcaggcaaatttgtagcatggatttccaaaagttggattgctgggttagaggatacatgcatctgtaatctggtacatattgccaaattactctcaatgggagtgtacccacttacatttcctctagctatttgcctgagaagacaatcctcagtcacattctatgagctgatcatctttgactcttatattaattattcatttaaccagtttagaaataacaataaatccttattttgaagggcctattttccataggtttgtcttttgtgatttcattcctgtacctcatttttaaactttctccttctataaatgttgtaacagggactatgggtgacatgtgcttttttatatatttctagttttccactatgaacgtgttttatttttaaaataatggctaaattaaaagccctaaataggggagtgaagaagaataaattagatctaccctccaaaatgctgcttgagttaggctattgtaataaaaagcagaacttggttttgagcttcttaactgctttcagagactaaatataaaacttattggttgggagaggggcatactgttcattaaggaaagcacaattttttccgtagccttcaagtttgtgagaaatttgtgacatggaaccttctgcaataataactaacataatagatgttttccattagcagtttaaaaagctaattaatcctcgatgaatgcaaaaagcaaaagttgctctataaaggctactctgtagagggatttctttgatgtggttaagatcattggtactcaagctttagcagacatcatagtcacttagagagtttgttaaaaacacagatttctgatccccattcttagaatttctaattcagcaagattagggtagaacctgtgaatgtgcgtttctagcaagataccagttatgttgatgctgcactggtccagggacaacactttgagacccaccagtctacttgttctaccatctattgacctgacttcattttagaacaaagttgatgatctattagctatctcctatctgacagataatgtagagattgctaagaagtttttagagactagatattctgtaatgtgaatgaaaggaaattgtttatgctctaaataccaaacttttagatgacaaagataataggtgaagaattgggttacaaaagtatgggctataggagcacctcctgaactctcagaaagtagctaagatttccaagcagatacacaattgaacctccaaagttcattgctgtaaagcacaaaaaagcaaatgcctgacctagaatatcttgaaagcagaaattactgaactttcatctctaccttatgactttttcaacagctagttttcacacaaaactattttaccatataagttattccattaagatttctagccgggcatggtggcccacgcctgtaatcccagtacttcaggaggccgaggtgggcggatcacttgaggccaggagtttgagaccagcctggccaacatggccaaaccccatctctactaaaaatacaaaaaaattagccaggcgtggtggcacatgcctctagtctcagctacttgggaggctgaggtgagagaatcacttaaacccggatggcagaggttgcagttgagccgagatcacaccactgcactccagcctgggtgacagaccgagacttcttctcaaaaaaggaaaaatgtctagaggccagatgcagtggctcatgcctgtaatctcagcactttgagaggccaaggcaggaggatcacttgaggccaggagtttgaaaccaacctgggcaacacagcaagacctcatctctacaaaaaattaaaaatttagccaggcatgatggcatgcacctatagtcccagctactcaagaagctaaagcgtgaggattgcttgaaatcaggagtttggggctgtgcatgagctgtgatcatgccactgcagtccagtctggacaacagagcaagaacttgtcttaaaaaaaaaaaagtggggttggggggtaacccagataattaattatttaatgttatacatctcaatattaaagtaaaacctgtaaacacaacagtttaggtttgactatttcttagaattacgacaataagccagtaatgttattttgagattactccaagaatgtgaaagttgtgtcatcattatgttaaactaagtgttcttgcctttagttaaggttccctagactacagcgaagtagtctacccagtccagtcatctgtagagtcattcccaatcctgagattcaggtcttctgtggtcattgtgtcaacaagagcatacattgactacctggaactagatcttggtatacaaaccttgtgtcattgtgcaacctcaaaaggagagacttgtatattgaggcatgccagatatctcttgtcagagagaatcagatggaaatgaagacagttcttattgtgtatgttgatagctcagacatagcccttaacattaaccagaattagggtggctggccccatttttctccaccaaaactatgcattgttacaaagtatactgaacaagtctaaaatcttaggtgtcagaggatttgttttctaaaaggcaagtctctaataaacaatatttaagtgctgaaaggagctttgcacttaacctgatcatcctgccttgtgccaataaataatttttattccttgtcatgcatatttcagagcatctatctcagtcatggttctggggagagaagccataatatcttaagacattcactgaatataatgaattaacttcatttctgtgtatctaggatgatatcagctgtgtactttcagagaactgagaaaatagtcatcagtccttttttgtggtattcacacaaaatacccagatacccagttgaaatcttccagagagtctttagtaccagagaaaacactgtcatttgctttttgaaattcaaattcagctctttctccaacaaccaacatcacagttgagactctaagctgaggtagaaaaaagccaacccattcctttctgtatcaatctctcaacaaaaaataagggtttgattccccctccccgccccagagctagatattgatagagagtaatcaatgtaaaagagactttagacagagtacactacactgcaagaatgttaatgtgatcaagcatcaggggtcacagctaactcaaagacagcaggggagagggcatgtagaatacttattaggcaggaagggaaatcagaaaggccatgagatcattcatttgtttattcaataaatgtgaatttatatacctacgttgggttagatactctactgagtgctaggtctatagaagtagtaaaacattgccctagtccttaaggtgttcacattctaatagggaaaataaacataataaacataattataatgcaaagtgtattgttagagatggtaccaccttcacttggttgctcagactgaaacctagaggctttattttctttttacttttattattatggaaaatttcaaacatacaaaaggagacaataacatcatgaacccccttgtacttgtcactcagtttcagcagttaccaactcatggacaattttgttccatttctctttccaccaacttccttccaatattattttaaagcaagatgtcatatcatttcatctgtaaacatttcagtgtgtagatctgtaagataatgtctgttttaaaaaaccattctcacaatactgtcatcactcctaaaacaattcacaaaaattcctaaatgtcaccaagtaatgggagtcattttaaactcttgtttctctcttctcaagtcttgtctattccatcagcaagtcctattggtcaacttccaggcaggtcactttaccacccctgctattaccaccctacttctgcagtcacatctctgtagatactagagtttaaaccaacagtttacttctgctcttggttttccaaagctagttttattaataactgttagagtgatccttttaaaattgtctaagacagagtactcttattcggtatctgtgggggattgtttccagagccccctgtggatactaaaatcaagtcccttatatacagtggtgtatgaagcatttgcctataacctatgaacctcctcccatgtactgtaaatcatctctgggttacttaaaataccttatatagtgtaaatgctgtgtaaatagttgtactgtattggtttttaaaatttttattttttattgtattgtttttattgaggtttttttggtgaatatttttgatccacagttggttgaatctgcagctgcagagggccagctgtattccattttcctgttcagaaccccacatgagttcacattatccctgaatgacaattctctaagttaagtgatctgcctctgctgttctccctccagccttatctaccactctcctcacactcctctcactttctgcttgtatagatgagtcatctccacctgacttacctggtcttttgcaattgcttagacacaccaatttgtttctgcctcagggcttttctgcttctgcctgcaatgcttttccctcagatcttcacaccagtcactcccttacttcattcaggcttctgctgcagtgttaccctcagaaaggcctccgaccatgttgccattacccactttctctcttttttaaacttaagttttgttctcttatacttattatctaatattatgaaatgtttattaggatatatgttcctcaccagaatgaaactttatgagggcatagtcttcatctgcctttttcccactctgttctcagtgccctagccctgtgtgtaacatgtaatacgcccccaacaaataaatgttaataaattaatcaaatgcttccttaagacacaaaacagttcaacatatgtgagaaacttaaaatttaaaaatgtatagaactaaagacaccataaggacgagtgaccagctgagaaaacgaatataataatgttaattagaacaaaaaggatcattttaatataaagaacaagggatttatatgaagaatacaatgatattcaacttttctagtaatctggaaaatacaaattaaaaccacagtgaaatactattaccctcagattagcaaaatataaaaagcctgacaatattaagtattgcgaaagttatggaataactctactggtgggtatataaatcggtacagtcactttgaatagttatttggcaatatctggttaaccgaggtgaagatgtatctctggctcagctgttaaattcctgggtatataccctagagcagacttgtccaacccacagcctgcaggccacatgcagcctacaggatggctttgagtgcagcccaacacaaatttgtaaactttcttaacattatgagattttttttgcagtttttttttcttttttagctcatcagcaatcattagtgttagtgtattttatgtgtggcccaaggcaattcttccagtgtggcccagggaatccaaaagattggacacccctgcctagagaaactgaaatatgttcacgagtagtttatttcattgcagcagtatttcatggaaatgtggaaacaatgtaaatgttaatatgcagattggataactgttgtatttatgtagtatatagctgttaaaatgaatgatgtagagttaaatatgctcacatagttaggataaaatagtattgaataaaaaaccaaattacagaaatatacatatagtatcctaatttttttacttaatacttacaactatttgtgtacatatagctttgaaataaaaatataccaaaaaatacaagaacatgataaaccagctaacagtcatcttgatggtgggagggacttagggtcagtgaagcacacaagggggagcttcatctcttccccagcaaatgtgagaaaatcctagatttgataaagctgtttaatggataaaagggtatctgttaatatcattttctatactttatgtatgtttataatataattttaaaaaactttcctagtaaagttgcttattttatatttaggagtacattttctctctgtgaagataataagactaaagcaagagtacatgtaatttcaataatgaagttacactaaaattgagaccacattcatgggtaataatttccaagtgaaactccccaaatttaattgatactaaaattttaaggaaagcagttaattcctctcctaactggacaaactaagtatggattaatgacagatgacggtgagtatagttaacaggagtgacctctcagagaatcgtggggattgagtgatgggcaggctctcaaacatctaggcagcaggctggaaaattatattctttgagcttaagtttatttccgattggtttcctccaaggagctttgtcttctatggacagagaaatattaatacaacttgaaaaaaaatgctttgcactgactctgatagctgaatgatcatcaaatgctctttaatggccttttaaaattaaaaggtatttaatctgtaactccaggtggttcccctctctcagcgaagtggtgttcttgaatggtgcacaggaactgtccccattggtgaatttcttgttaacaatgaagatggtgctcataaaagatacaggccaaatgatttcagtgcctttcagtgccaaaagaaaatgatggtgagtgacacccaaaattaaaggttattgtaagattatttaatggcttattaaagctgacagctgtcagatattatagaatacaaaaaaactttaatttcatcaggtaattgtcaaagatactaagtaaaagaaaaactcatcagaatgaaagtgtgtgagtgaaaaaggaaggattttaaactacataatatgtcaacccttgtcagataagaaatgtaaaggttattcaatgtgtgctgatttgttttcaatttgggataaactaattcttagcaaacaaaacactaaaatgccaggcacgatggcatgcacctgtaatcccagctacttgagaggctgagtctgggggatcccttgaacccaggattttgaggccagcctgggcaacagagcaagaccccatctctaaaaaacaaacacagtaaacaacaacaacaacaagattatgaagtaattttttatgaaactgatatagaaaaccttctgagacatttacaatgtcacattggccatctagtctgatattcattcgctgaatcagcaacatttattgtatgttttctgtctaccaggtactgtgctgacttaagacttcacaaatatcaaatattacgactaatcatcataatccttatcctcattttaaaatgagaagttcagagaacttgcccaaggccagtgagctaataaacagagcaaggatttgagccttgtctaaatccaaaatccatttattgttcattttattgtgctttctgtgacatgttttttaaaatgtgtgataagtgctataggtgttgtgatggaagtctgtacagggcacacagggtacagtgtaggtatggaggaggaagtgcttagttctgcctggggtggggagaatagacagaagtagatccaagaaatgcttcacagaggaaaaggtgtgtgagccgagttttgtaaatgagttgtttttccaggcagaaggagcatataagcaaaggagaggagacatgagcaggaaaagacaacataagcataggcttagtgtttgaggaagaaaagatgagattggagcagtaattgttggtcaaaagatggagtgttgctttatgaaatgcaaaggagtttgcaccttatgctataggcctcataagaccctaaaggatagtaatatcagacttgcattttagaaagaaattccgacggcactgtgggttctatttttgagaatgcaaactggaggcatgagatggtctgaactgagatgaacagcagtaggaagggagaatcgtgggtagagatgagaaatatgaaggaggcagaattcataggatttgattgctgattaaaaataaggttggggggcgggtgtggtagcgcatgcctgtaatcccagcacttaaggataccaaggcaggaggattgcttgagcccaggagtttaagaccagcctgggaaacatagtgagaccacatctctacaaaaaataaaaagtcagccaggtaatggtggcacatgcctgtaatcccagctactcaagaggctgaggtgagaggattgcttgagcccaggggccaaaattgcagtgagctgtgatcacacccctgcactccagtccaggtgacagagaccctgtcaccctgtctccaaaaaaaaaaaatgttggagaaaaggagtagccagtgcctcccagttttctgtttggggcagctgggtagatggtgaagctctttactgcattgaagaatagaagaggtgactaaagtttgccagagatgaagtatttgaatttggaagtgatccaagtgaagatgctgaatgggcagcttgagaagcacattaagctaaagcttaataaagatatctgggccaaacagatttagaaatcatcagcacatagatggaagggagttgaagtcggtaagctttgcttcaggtagtattttatggcaagaagatgttggaggatagagatctgagtcatatcagctgccatctatgagggattcttctgttctttctcttttcctgttttctattgcaacccaatgctgtgatgccacctgaggttatctggaactacttaggcatttctgtgtttatttctgcttaagagtacaggattattcaaattagaatttaatcaaaacaagtaacagtcactgtaggtgtgcttcctcccccaacaattaatatggaaatcctaaagggattatcacttgtaattaattgcttccctgtccagactgttagcttcttgtaggtaatgtatcctgttcatctttattgcccctatatctgtcatatttttatataaaaatgtgtatattagtttaattgaacacaatattgaaaaataattatatatattctctatttaaaggaggtgcaaaaaaagtcttttgaagagaaatatgaagtcttcatggatgtttgccaaaattttcaaccagttttccgttacttctgcatggaaaaattcttggatccagctatttggtttgagaagcgattggcttatacgcgcagtgtagctacttcttctattggtaatcttcttgtacatatagtagattgagcactttgttgtttggcaggttttatttttgtttgattcagcactttttctacattctgagttgcagggggatgatagtgatgatgtggttagtaaccaacccatcttcattattaaatcatatgtttcttgttcatcctgattcttagtgtctacctttttataacttatgcagaagagaattctcctacttcaataaataataaaaagacagggttttcttctttgttttatagtgaatatggcatattttctctcctctcaatatattattttctgagactttctttggaaaataatgaaacctgtgataacttatttcctttaattatttttgttcttttgcatataacctctaaatatcatcacctagtgattaatactttttaatagaattttgttttcagaatagaaaccatgagatatatttaaatattttgtgtacaatatatattttgactttttttccctaagaaattagaataggtagatagtatggttaacaaaatcctagagtatgagaactaatgtaaacattagagatcatctaatctatttgttgttttttttttttttaactaaagacaactccctccatcacttacatactataccccaggaaggcagggcatgtatgttttgaaagagttcccaggtaattgtgaaactctcttctacatagagaatcactaatctgatacaactagtttataaacaagaaagtaggcctagttaatgacagagcaagccagacacccagtcattctgattccctacccagtgtgtttttttgtaatgccatgtgatttctcccattagtgcatgtcatcatctgtcttaaatacagaaatgcagttttttggggggatacacacctggtgaaatgaattaatgattaatttgtgttaaatataattcatcaaggagaagaaagtttcactgaagagtgaagagtttatccatagacttctcattttataagtatgttcaataaaaatttgagtacatataatgcacagctttgacccaggtaaataatgggtctcaactttagccacaataattttttaagtactaatattttaaaatgtgtgcctattagtaaagagaaaatttttttagcaaatcatctaggatttgtaaaatgcaatatgcattaaaatagctggcaagatttgagttaaactcaacatggccggttatgcacatcatttaagtaggctaaaaatcctaaactacttaaagattataccaagtcagtggtcttaattgaaattatggctatatattagaaagagatggaatcagtgatttcagattgtttgtttcttttttctccagttggttacatacttggacttggtgatagacatgtacagaatatcttgataaatgagcagtcagcagaacttgtacatatagatctaggtaagtaataaaatctatgtatctattctttttagtaaatatttggtcatcatggaatgttgtttgcctaccaagatattacaaatataagagacagataaattgaagcagtaaatattgggtttttttgttttcagcataaacagttgtcctagaagaaacagttaactctgcctggggtactgagtgaaacttaatagatgaggtgtcttttgagcctggtcttcaagaaagaaagaaagcataattcagacagaagatagagcagattcaaaagaaggaatcagggctattccaccaaaacaaggagtaattttaagatgtagcatgttgtgggagtggtgagacattaaatgtgtctggagtgaagtaagcctgtagttgagtcgcttgagagagagattggtactagactgtaaaaagccaggctaaggagtttcaacttcattgcattaaactataggaaataaatgaaggacatgataatattttattttcagaaatataatttcaggagcactttggggagtggtattggcagcaggaagaaaaattaagggatattgtaatagtttagatgagaaatgatgaagatttatactaaagttgtagaaaccagaatattggatttgagggacatttttgtagtaaactgtaccagtgatattagatgaggaaatagtgggggagtggggcccccagataactgaagcttctaactaaggaatatatcaagttttgtaaatagtaagaaagtgatgaatttagttttgctcattattttgaagtattaatggaatttctaggtggaatagacagtttaatatataagaaagaaagaatatatagcttctatgtatatatatagacagtttaatataaaagaaagagaatatatatagctaaggaatatatcaagttttgtaaataataagaaagtgatgaatttagttttgctcattattttgaagtattaatgggatttctaggtggaatagacagtttaatatataagaaagaaagaatatgtagcttctatgtatatatatagacagtttaatatataagaaagaaagaatatatatagctaagaaatatatcaagttttgtaaataataagaaagtgatgaatttagttttgctcattattttgaagtattaatgggatttctaggtggaatagacagtttaatatataagaaagaagtgtgaatgtaatgtaaagaagtgtgaatgtaatgacaaacttctattaaacagtattaatcactaggtgataatttttagaggttatatgcaaaagaacaaaaataattaaaggaaataagttatcacaggtttcattattttccaaagaaattctcagaaaataatatattgagaggagagaaaatatgccatattcactataaaacaaagaagaaaaccctgtctttttattatttattgaagtaggagaattctcttctgcataagttataaaaaggtagatgctaagaatcaggatgaatatgaaacatatgatttaataatgaagctggtttggttactaaccacatcatcactattatccccctgcaactcagaatgtagaaaaagaagtgtgaatgtaatgacggagatccagaatcttcagcaaatagatttcagttgaagtcactgggctggaggaggttctgatctcacacatcatccgtgataaagagacctaaagatgaaatcataagggaagtgagccttggaaaggctgagccagaaaaaaactgagaagtactcaaaggaagtcaggatcttggaaggcaagaggggaaaatcttttatgaaagaagtagtgctcaatagtatctgatacagaaaggtcagagaggatgaatgctgaaaatagacctttgaatttaacaagtaatcaatcctagaggccttggaagtcccctttggatagaatggaggaaaccatactgtaaaaaggcaaggactgaatggaagttaaggatgtgtagattaagaatgtggaatctgccaggcgcggtggatcacacctgtaatcccaacactttgggaggccaaggcaggtggatcacgaggtcaggagattgagaccatcctggccaacatggtgaaaccccatctctactaaaatacaaaaaattagccgggcgaggtggtgggcacctgtagtcccagctacttgggaggctgaggcaggagaatcacttgaacccaggaagcagaggttgcagtgagctaagatcatgccactgcacttcagcctgggcggcagagcaagactgtctcaaaaaaaaagaatgtggaatcttcctacaagaagtttagaagggaagggaaggatggcagagaaatttgctgcaggaatgagagacacatttggtccttgcttttttaagataggagaggtttaaacctgttagatattgaagatacaggagaaaaacaaaagataattgaaatagcaagggaaatcataaagtacgtgagtctgatagcattggctttagattggaggcatgttagcttttctgctgagagagaaggaaaagtgatgccaataggaaagtcttaagctggagaggaaggagtatgagggaattatatttgctattgtgtttttgctgagaaatagaaagcatgctcatttgctaagaattggagggatggtaactggccttaaaagaacaaataaaattctaaaatttaccatggaaatgagaccaagacctgactagaaagggataaataaataagacatgccaagcagtttaaggggcactttcaatcctaaatttgtagtggagccaatagggttgttgtatgattttccagcagtcctcaacatccttggagcttaagttgtagtttaaaatgggagatgtggtggagggacaaggggacaaggagatttgaagcactgatgagagtaatcaaacttattgtctctacccctgggctgagttagggaaagaagagggctaataaactagaaatctcagtcaaatttgaagactgtttagtaagaataaggggtagaaggagaagaggttttgattagaatgtacaatttacaatgtctaagaagcagttttagcagactcatttctggagtacaacccatatgagtggttcattaagatagaatgaaattgaattccattagaacagagacagtcacggatattatatggttttccccagaatgaattctagagttgggacagaggggaagattgtgagctaggtccatgccaacattcagcgaatgtgagagaaaaccttacaggtttacagagtaaacgtgaagatggaagggatttgttagagctagaaggtggggatctcaacagaggagccagactttatctgagaatgaaaggagagtggtctggaagatgcaaattagaggtaggagtatgccaacctgagtccattcaggtcgtgctaaaagcatctataaatgagaagggtaaattggtacaacccctttggaatattgtttggcattatccactaaagctgactttatgtatatcctgtgacccatcaattccactccaacacaaatgcatacatatgtataaaaatgtttatagtagcattattcataatagcccctaactggaaacaatccagatatccatcataggtagaatggatgaacaaattgtcgtatatttatattctctttgtatataatgagattgaatgaataataacacacaatatagaagactctcacaaatataatgctaagtgaaagattccaacataaaagagtacacatgtataattccatttacataaaattcaaaagctgataaaattaatgtatagtgttagaaatcaggatagtggtgaccctttgaaagaggtgattagtgactggtaggagggactgaaagggggcctctggaatgctggtagagttctgttaacgtggatttgttcactttgcagaaatcccagtgagtcacacttgggtgatttgtatactattctgtgtatgtctgtttggttacctgttgctgcataacaaaccaccccaaaatttagtagcttaaaatcacaatttatttattattatctctcatagtctgttgactgggctcagctggacagttttcacttaggatctctcatgcagctgcagttagcatctggggctggagttatcttaagactcagctgggccagagttcatgattgcttcttcacttacatgtctgatgcttcagcactcccatgtggcctctctgtccacaatagtgtcctggacctactcagcatcttggggctccaaggggaaggaagtggaagttaagggctaggcctgcaacttgcacagtatcacttccatcacattatgtcatcacatagtcatgtcatagggtccatcctggttcttccctgtttctgggactccagtaaccctatgttaggcctttgcaatgtatcatttatactgttacctgctagtctatattttctaacctttttttccttttttctgactcactccttggtgtcagtggacatatccggggaacctggactttcagccctactcagctatagcaagccctttccctattgagtgtcagtggaggccaattggggaatctagtcttctgcccttacctagcagtaacaaggtggtgactcccaaaggcattaaaggcagaagtttaaggaagatcctgagtctcgtaataactaaaaggtgtaggtgtcaattgaaaatcattaggcatacctggaaccaggaaaatctcaactttaatgaaaaatggccacctgtaggtgccaacactgagatgacaatgatgttggaattatctaagattttaaagcagccatcataaaaacactgaaggaacaattacaaacatgcttgaaacaaattaaaatatagtaagtctcagcacagaaataagtagtctcagtatagaagtagatataaaggagaaccagatggaaattttagaacagaaaaatatagtaaataaaataaaaaatttcaactgcagaatgaggagacagaagaaattatcagtgaatagaagacagagccgtagaaattacccaagctgagcaacagaggaagaaaattaagaggaaaccttcagcatctagggctaaacagagttcctagacttgataccaaaagaacaatctttaagaactctcaaaacttaacaacaaaatctacttataaaatggccatgtactacaaatgtgtatagcagctttattcataatagccaagaaccggaaaaatccagatgttctacagtgggcaaatgcttaaacaaactgtgttacatccatgccctgaaatactactcagcaatgaaaagaaacagaactattgatatacataacaatttggatgaatctccagagaattaggctgagtgtaaaaagctattcccaaaaggttacatactgtatgattattccacttccatttatataacatacttgaaatgacaaaattataaaaatggagaacagattagtggctgctagaaaaatagggggtcagagggctgggtgataggctatgggagggaaataggtgcagccgtaaagggcagtatgaaggatccttatgataggaatattatatatcttgactgcatcgatgtcagtagtagtatagttttgcaggacattacagttggggtgaaatggggaaaaggcataagggatgatcttttctgtatgatttcttacaactcgaagtgaacatataattatctcataaaatgtcattaattttttttttttgatggagtttcactcttgtcgcccaggctggagtgcaatggcacgatctcagctccatgtatccttcacctcccaggttcaagtgattctcctgtctcagcctcccgagtaactgggattataggcacctgctaccacacccagctaatttttgtatttttagtggagacaaggtttcaccatgttggccaggctggtctcttaactcctgacctcaggtgtcaggcctcctcagcctcaaggtgctgggattacaggcgggagccaccacacccagcctaaaaattttttaaatataaatatatcatctccattttaaattataccagtagttacttcatttttaaaaatcaccctttaacctagatttctctagttgggttaagaagtagttaggttatttggatttgaggtggatctcacagacagtgacaaagatgaggaaggcagccagagcagaagtaaactactgtacatactagtgttcatagaacgtaggtaacatgtggtttcttgcctttgtaaagttcacattctaactggaaagaaagtaaattagctgtcaaacctcctaacttcactgtattctttactttaggtgttgcttttgaacagggcaaaatccttcctactcctgagacagttccttttagactcaccagagatattgtggatggcatgggcattacgggtgttgaaggtgtcttcagaaggtaagtgatatgaagtaaaggagggaaataatttttgatgtcaaaattacatgggctgggcatggttctttgcacctgtaatcccagctgctcaagaggctgaagtgggaggattgtttgagcccaggagtttgagtccagcctaggcaatacagcaagaccctgtatctaaaaaaatacacacacacaaacacacacacacacacacacacacacacacacacacgggttagagatttgtatagattatagaatttagtgctagaatcgtattccagtgccttatcaatactaaggaaaagaccctgggtaaaagcaataatagttcctcttccttccacccacctgggacctaagcccatgtaacatacatactgttattccaaacctcctctggaagcatcccacctttacttttaacacctctatcctggctgactccttcttaatgatccaaactactattgggtgctcatcactgtgcatatagaagagactacatttttatttataggagcttgtgttctagtataacattgtgctactaaaaaagctttgcagttccttgtagttttcccagcataggtctgtgtactcaacttggattggggcagattgcagtcagtgtaaactaataattgccacaataatcaaagactgagagctgagcccagtggtgcatgcctgtaatcaatagtgttgtgttattcttgtaaatgccaagcttgtgaaatagtcaaatacatatttgtattcatttcaaacgtctaatgaaagcccactctgccaagtattatgctattttgagatacagatatgtagattattaagcataggctcagcatactacacatgagagtatacagataaagatacgttgacaacattggtgtgtaacaaaatccgtatttataatgtgtttgactctagatgctgtgagaaaaccatggaagtgatgagaaactctcaggaaactctgttaaccattgtagaggtaaagtattttataaggaagactttattttttttcttaccaggtagactgtgtatctcatcaggaagtcactgatgtgaagagcactgcttcattttaacatagggggatgtggctgggcagcagaaaggaggagattgtgcacttagccttttcacacatccaaaaatactggtttagaaatgccttcagcccccttgagtttcttggaatgttagagcattgtaagtagtctctagttttcaattcataaatcaattctttgacatttagatattccatatggtattattattttcagaatggtttccattagggtttaagaaaaatcagaaatttatatctcctttttccctgctcaggttcagaactaattagtcagacaaatggagatcaaattgtcagcatcattactagaggaacatggcttaggaatgagggccagactagtttactgctggtgctacctcagtacctctctgctgtcttaactttgggacagctcacctgaatagggtttgggcctgcagagcaaacacatgtaatcaggatcactgccttgtcttgatccagggcagaaaaaaggaagtcaaacaaatttcagtgtctgtgctgttagtacctatgccagtcattcaccaatctggtaagggtatgtgagacaagaaatcaggagtgtggcctccccagggaagcatggcaggtagagtgcagtatgggcttgccacttttccactactcagcttttcttcctttaacctgatttatgttggactggctgcatgttagtattacttttactgcatttaaaaaacattgatgctgatcaaattcaaaccaggtttctagagatggggcaggaatatgtgcatttttaaaaatctctcctactgttcaactaggatatgagaactgtcttaattcattggcattaaccattaagcctgtggtcaataagggtggggctttatcccttggaagatgagtaacagtccatcagggtggtcctgtgtgcacctttatgaaccgaggcatctttatagatctcctttggactgcagatggtaatacagattttgctacaaggagtttgctgaaataggtcccaataatacgttggtaaaattaaatccaaggctgtgctattcccaaggttaaaaatacattcttttttcttttaccgatttcaaattctgttcatacatgttgtcatttgttacagtttgccattggttctgcagtaagaataaatgataagaaaataagcatgatgtgtaacattttaaaaaaataatacatggtaacatggatgcctcaataatgtcgaaattaaactctaaagttatattatcttgcactttttcatgtaagaaaaagagggctgggcgcggtggctcatgcctgtaatcccagcactttgagaggccgagacaggtggatcacctgaggtcaggagttcaagaccagtttggccaacatggtgaaaccccgtctctaataaaaatgcaaaaattagctgggcgtgatggcgggcacctgtaatcccagctactcaggaggctgaggcaggagaatcgcttgaacccaggaggtggaggttgtagtgagctgaaattgcaccattgccctccagcctgggcgacaagagcaagactctgtctgtcttaaaaaaaaaaaaaaaaaaaagcccaaacttttcaaattaaagagtcaaagcagcttaacatattctttagtattttactctacctagtttcagtcagaagggatttttatgctaaggtggatttgggagtttcttccagtacttgtatcctacctaacactcaccagaagaaggtagttcttttagggcctcagaaatcttactagtttaatgccaaactgcttatggacttcactttttagagtagtaggagatcaaatgagagaagtgacagtggccagatcctttgccattgtaaggactttggatttcctttgagtgagggttttgagtctgaaaagtgatttgcatctccacctacaataactgtcacctttaaacacaccctccgggaggaggagccaagatggccgaataggaacagctccggtatacagctcccagcgtgagcgatgcagaagacaggtgatttctgcatttccatctgaggtaccaggttcatctcactagggagcgccagacagtgggcgcaggtcagtgggtgcacgcactgtgcgcgaactgaagcagggcaaggcattgcctcacttgggaagcgcaagggtcagggagttccctttcctagtcaaagaaaggggtgacagacggcacctggaaaatcgggtcactcccacccgaatattgcgctttttggaccggcttaaaaaacggcgcaccacgagattatatcccgcagctggcttggagggtcctacgcccacggagtctcgctgattgctagcacagcagtctgagatcaaactgcaaggtggcagcgaggctgggggaggggcgcccgccattgcccaggcttgattaggtaaacaaagcagccgggaagctcgaactgggtggaacccaccacagctcaaggagacctgcctgcctctgtaggctccacctctgggggcagggcacagacaaacaaaaagacagcagtaacctctgcagacttaaatgtccctgtctgacagctttgaagagagtagtggttctcccagcacgcagctggagatcggacaacaggcagactgcctcctcaagtgggttcctgacccctgacccccgagcagcctaactgggaggcaccccccagcaggggcacactgacacctcacacggcagggtactccaacagacctgcagctgagggtcttgtctgttagaaggaaaactaacaaacagaaaggatatccacaccaaaaacccatctgtacatcaccatcatcaaagaccaaaagtagataaaaccacaaagatggggaaaaaacagaacagaaaaactggaaactctaaaacgcagagcacctctcctcctccaaaggaacgcagttcctcaccagcaacggaacaaagctggatggagaatgactttgacgagctgagagaagaaggcttcagacgatcaaattactctgagctacgggaggacattcaaaccaaaggcaaataagttgacaactttgaaaaaaatttagaagaatgtataactagaataaccaatacagagaagtgcttaaaggagctgatggagctgaaaatcaaggctcgagaactatgtgaagaatgcagaagcctcaggagccgatgcgatcaactggaagaaagggtatcagcgatggaagatgaaatgaatgaaatgaagcgagaagggaagttcagagaaaaaagaataaaaagaaatgagcaaagcctccaagaaatatgggactatgtgaaaagaccaaatctacgtctgattggtgtacctgaaagtgatggggagaatggaaccaagttggaaaacactctgcaggatattatccaggagaacttccccaatctagcaaggcaggccaacgttcagattcaggaaatacagagaatgccacaaagatactctttgagaagagcaactccaagacacataattgtcagattcaccaaagttgaaatgaaggaaaaaatgttaagggcagccagagagaaaggtcgggttaccctcaaagggaagcccatcagactaacagcagatctctcggcagaaaccctacaagccagaagagagtgggggccaatattcaacattcttaaagaaaagaattttcaacccagaatttcatatccagccaaactaagcttcatcagtgaagtagaaataaaatactttacagacaagcaaatgctgagagattttgtcaccaccaggcctaccctaaaagagctcctgaaggaagcactaaacatggaaaggaacaaccggtaccagccactgcaaaatcatgccaaaatgtaaagaccatcgagactaggaagaaactgcatcaactaacgaacaaaatcaccagctaacatcataatgacaggatcaaactcccacataacaaaattaactttaaatgtatatggactaaatgctccaattaaaagacacagactggcaaattggataaagagtcaagacccatcagtgtgctgtattcaggaaacccatctcacgtgcagagacacacataggctcaaaataaaaggatggaggaagatctaccaagcaaatggaaaacaaaaaaaggcaggggttgcaatcctagtctctgataaaacagactttaaaccaacaaagatcaaaagaaacaaagaaggccattacataatggtaaagggatcaattcaacaagaagagctaactatcctaaatatatatgcacccaatacaggagcacccagattcataaagcaagtcctgagtgacctacaaagagacttagaatcccacacattaataatgggagactttaacaccccactgtcaacattagacagatcaacgagataaaaagtcaacaaggatacccaggaattgaactcagctctgcaccaagcggacctaatagacatctacagaactctccaccccaaatcaacagaatatacatttttttcagcaccacaccacacctattccaaaattgaccccatagttggaagtaaagctctcctcagcaaatgtaaaagaacagagattataacaaactatctctcagaccacagtgacatcaaactagaactcaggattaagaatctcactcaaaaccgctcaactacatggaaaccaaacaacctgctcctgaatgactactggatacataatgaaatgaaggcagaaataaagatgttctttgaaaccaacgagaacaaagacacaacgtaccagaatctctgggacacattcaaagcagtgtgtagagggaaatttatagcactaaatgcccacaagagaaagcaggaaagatccaaaactgacaccctaacatcacaattaaaagagctagaaaaggaagagcaaacacattcaaaagttagcagaaggcaagaaataactaaaatcagagcagaactgaaggaaatagagacacaaaaaacccttcaaaaaattaatgaatccaggagctggttttttgaaaggatcaacaaaattgatagaccgctagcaagactaataaagaaaaaagagagaagaatcaaatagacacaataaaaaatgataaaggggatatcaccaccgatcccacagaaatacaaactaccatcagagaatactacaaacacctctacgcaaataaactagaaaatctagaagaaatggataaattcctcgacacatacactctcccaagactaaaccaggaagaagttgaatctctgaatagaccagtaacaggagctgaaattgtggcaataatcaatagtttaccaaacaaaaagagtccaggaccagatggattcacagctgaattctaccagaggtacaaggaggaactggtaccattccttctgaaactattccaatcaatagaaaaagagggaatcctccctaactcattttatgaggccagcatcattctgataccaaagccgggcagagacacaaccaaaaaagagaattttagaccaatatccttgatgaacattgatgcaaaaatcctcaataaaatactggcaaaacgaatccagcagcacatccaaaagcttatccaccatgatccagtgggcttcatccctgggattcaaggctggttcaatatatgcaaatcaataaatgtaatccagcatataaacagaaccaaagacaaaaaccacatgattatctcaatagatgcagaaaaagcctttgacaaaattcaacaacccttcatgctaaaaactctcaataaattaggtattgatgggacgtatttcaaaataataagagctatctatgacaaacccagagccaatatcatactgaatgggcaaaaactggaagcattccctttgaaaactggcacaagacagggatgccctctctcaccactcctattcaacatagtgttggaagttctggccagggcaatcaggcaggagaaggaaataaagggtattcaattaggaaaagaggaagtcaaattgtccctgtttgcagatgacatgattgtatatctagaaaaccccactgtctcagcccaaaatctccttaagctgataagcaacttcagcaaagtctcaggatacaaaatcaatgtacaaaaatcacaagcattcttttacaccaacaacagacaaacagagagccaaatcatgagtgaactcccattcacaattgcttcaaagagaataaaatacctaggaatccaacttacaagggatgtgaaggacctcttcaaggagaactacaaaccactgctcaaggaaataaaagaggatacaaacaaatggaagaacattccatgctcatgggtaggaagaatcaatattgtgaaaatggccatactgcccaaggtaatttacagattcaatggcatccccatcaagctaccaatgactttctttacagaattggaaaaaactactttaaagttcatatggaaccaaaaaagagcccgcatcggcaagtcaatcctaagccaaaagaacaaagctggaggcatcacactacctgacttcaaactatactacaaggctacagtaaccaaaacaacatggtactggtaccaaaacagagatatagatcaatggaacagaacagagcccttagaaataacgccgcatgtctacaactatctgatctttgacaaacctgagaaaaacaagcaatggggaaaggattccctatttaataaatggtgctgggaaaactggctagccatatggagaaagctgaaactggatcccttccttacacctgatacaaaaattaactcaagatggattaaagacttaaacgttagacctaataccataaaaaccctagaagaaaacctaggcattaccattcaggacataggcatgggcaaggacttcatgtccaaaacaccaaaagcaatggcaacaaaagccaaaattgacaaatgggatctaattaaactaaagagcttctgcacagcaaaagaaactaccatcagagtgaacaggcaacctacaaaatgggagaaaattttcgcaacctactcatctgacaaagggctaatatccagaatctacaatgaactcaaacaaatttacaagaaaaaaacaaacaaccccatcaaaaagtgggtgaaggacatgaacagacacttctcaaaagaagacatttatgcagccaaaaaacacatgaaaaaatgctcatcatcactggccatcagagaaatgcaaatcaaaaccacaatgagataccatctcacaccagttagaatggcagtcattaaaaagtcaggaaacaacaggtgctggagaggatgtggagaaataggaacccttttacactgttggtgggactgtaaactagttcaaccattgtggaagtcagtgtggcgattcctcagggatctagaattagaaataccatttgacccagccatcccattactgggtatataaccaaaggactataaatcatgctgctataaagacacatgcacacgtatgtttattgcggcattattcacaatagcaaagacttggaaccaacccaaatgtccaacaatgatagactggattaagaaaatgtagcacatatacaccatggaatactatgcagccataaaaaatgatgagttcatgtcctttgtagggacatggatgaaattggaaatcatcattctcagtaaactatcgcaagaacaaaaaaccaaacaccgcatattctcactcataggtgggaattgaacaatgagaacacatggacacaggaaggggaatatcacactctggggactgtggtggggtggggggcggggggagggatagcattgggagatatacctaatgctagatgacgagttagtgggtgcagcgcaccagcatggcatatgtatacatatgtaactaacctgcacaatgtgcacatgtaccctaaaacataaaagtataatttaaaaaaaactaaaaaaacaaacaacaaaacaaacaaacaaaaaaaacacaccctccaatgctttgtgtattttacactcatctacctaatcttccctccgtaaatctgtccgaatttccccaaatcatttggtgtgattgttccaatcttcaagaataattttcccagtgatcttaccacagtaagaccctttctgccttcagctttaggagggtgcttctcaattagcatcctggttcccagtcctctgggacatcatttctttcctctcttggattcatttcttttcttctcttagatttcattgaggcacagtcactatttctgaactgatctccccgcttcctaagcccctccttcagagcactttaacctgggtgtatttcccttttcttttcagtgtatttgtctctcctggccttcaagattttattttcttcctaatggaccattctctcctctaagattttatgtgttatgctaaggaaatatatctctccctctaactcagtgatgcttagccaagagcagttttgtcccctagaggacagttggcaatgtctggaggcatttttattgtcacaattggggatgggagatgaggatagtattggcatctactgggtagaggccagggatgctgctgaacacctcagaatgtacaagttagcccccacagcaaagaaataccccatccaaaatgacaatagtgctgagactgagaaaccctgctctagcttaatcagtctgtattcctttactgtttccaaccacttctgtcttgtcagactgaaacataattttttacttattccagttcctccttaattctaatatttgcaagtatgattcctgacacaagcccttggttttgaagtaatttagatttttcttctacttcaacccaagaaaaccatctagtctgtattagaggccttcattccttttcattagttcattaataaaatatattaatatttcccttttgtgggtgaaactggtttggatctctgaaatctaaagccatgtcagtgcccaacttgaagtcacataggaaaccttgaacttaacggacaagctacatgtaatcaagctcagtttctccacagtatttaatggtcctggaggacactcaaaacagcattaaaaaatagagagattttggttctgctaatctagtacgtgtcctgaaactaaatctgctaaaggcattttatagtcccaacctgcagatttactgagaaactgtatacagatagcagcaaaaaagtgttccaaccttgtaatactggaatgccctgtagaatcattctttatattgtctccacttattactaagatttgtaagcatttgctaaagcctattttttttaaagttctgtgtttataaataccagagcagttagctgttctgaactgccaatatcagaaattcctcatgaactcactttctaaaatttacgacctaaagctacttgctctagccatgtcagttgttttggtatcctaattctacacctaatatatatctcaagattccaaacgcagcaccaaaccttgggttttgaggaggtttcaacaaattatacctttctggatccacccagatttagaactgagagaaaaagagccataggaatagggtggagatcagaatttcagatttgttactgataaaactattggagaagacggcttaggagtgaggtccaaataggcttgctggtgctctccagttcccacatcccaatctataccttgagacagcctgggctgaggaagaattgggccctacaaagcaaatacactaacccagggttaagagtagagagagaaggaaagaaagtgactaaccttttaatagattagtttcatccagtcaggaaacatgggtcaagggatgtcacccctaaccatggaggaagaatgaattcagaatgaaatgagaagcttggagcattatgctaggatagtttcctcaaggaaacatgaagtgtgcatgatgtttgttcccctcccccatcaactaccatgtgactggcttatttgtatgatactggttctactgtttctaagtatgtgattaaaatgtacattgttcttttaatacatatgttctctctgtttaggtccttctatatgatccactctttgactggaccatgaatcctttgaaagctttgtatttacagcagaggccggaagatgaaactgagcttcaccctactctgaatgcagatgaccaagaatgcaaacgaaatctcaggtgagcagtattttaagaaggtcctgttgtcagtttttcagattttcttattcccaaggcctttaaactgttcacctcactgaaacctttgtgtttttgtccttagtgatattgaccagagtttcaacaaagtagctgaacgtgtcttaatgagactacaagagaaactgaaaggagtggaagaaggcactgtgctcagtgttggtggacaagtgaatttgctcatacagcaggccatagaccccaaaaatctcagccgacttttcccaggatggaaagcttgggtgtgatcttcagtatatgaattaccctttcattcagcctttagaaattatattttagcctttatttttaacctgccaacatactttaagtagggattaatatttaagtgaactattgtgggtttttttgaatgttggttttaatacttgatttaatcaccactcaaaaatgttttgatggtcttaaggaacatctctgctttcactctttagaaataatggtcattcgggctgggcgcagcggctcacgcctgtaatcccagcactttgggaggccgaggtgagcggatcacaaggtcaggagttcgagaccagcctggccaagagaccagcctggccagtatggtgaaaccctgtctctactaaaaatacaaaaattagccgagcatggtggcgggcacctgtaatcccagctactcgagaggctgaggcaggagaatctcttgaacctgggaggtgaaggttgctgtgggccaaaatcatgccattgcactccagcctgggtgacaagagcgaaactccatctcaaaaaaaaaaaaaaaaaaacagaaacgtatttggatttttcctagtaagatcactcagtgttactaaataatgaagttgttatggagaacaaatttcaaagacacagttagtgtagttactatttttttaagtgtgtattaaaacttctcattctattctctttatcttttaagcccttctgtactgtccatgtatgttatctttctgtgataacttcatagattgccttctagttcatgaattctcttgtcagatgtatataatctcttttaccctatccattgggcttcttctttcagaaattgtttttcatttctaattatgcatcatttttcagatctctgtttcttgatgtcatttttaatgtttttttaatgttttttatgtcactaattattttaaatgtctgtacttgatagacactgtaatagttctattaaatttagttcctgctgtttatatctgttgatttttgtatttgataggctgttcatccagttttgtctttttgaaaagtgagtttattttcagcaaggctttatctatgggaatcttgagtgtctgtttatgtcatattcccagggctgttgctgcacacaagcccattcttattttaatttcttggctttagggtttccatacctgaagtgtagcataaatactgataggagatttcccaggccaaggcaaacacacttcctcctcatctccttgtgctagtgggcagaatatttgattgatgcctttttcactgagagtataagcttccatgtgtcccacctttatggcaggggtggaaggaggtacatttaattcccactgcctgcctttggcaagccctgggttctttgctccccatatagatgtctaagctaaaagccgtgggttaatgagactggcaaattgttccaggacagctacagcatcagctcacatattcacctctctggtttttcattcccctcatttttttctgagacagagtcttgctctgtcacccaggctggagtgcagtggcatgatctcagctcactgaaacctctgcctcctgggttcaagcaattctcctgcctcagcctcccgagtagctgggactacaggcgtgtgccaacacgcccggctaattttttgtatttttattagagacggagtttcaccgtgttagccaggatggtctcgatcgcttgacctcgtgatccaccctcctcggcctcccaaagtgctgggattacaggtgtgagccaccgcgcccggcctcattcccctcatttttgaccgtaaggatttcccctttcttgtaagttctgctatgtatttaaaagaatgttttctacattttatccagcatttctctgtgttctgttggaagggaagggcttaggtatctagtttgatacataggtagaagtggaacatttctctgtcccccagctgtcatcatataagataaacatcagataaaaagccacctgaaagtaaaactactgactcgtgtattagtgagtataatctcttctccatccttaggaaaatgttcatcccagctgcggagattaacaaatgggtgattgagctttctcctcgtatttggaccttgaaggttatataaatttttttcttatgaagagttggcatttctttttattgccaatggcaggcactcattcatatttgatctcctcaccttcccctcccctaaaaccaatctccagaactttttggactataaatttcttggtttgacttctggagaactgttcagaatattactttgcatttcaaattacaaacttaccttggtgtatctttttcttacaagctgcctaaatgaatatttggtatatattggtagttttattactatagtaaatcaaggaaatgcagtaaacttaaaatgtctttaagaaagccctgaaatcttcatgggtgaaattagaaattatcaactagataatagtatagataaatgaatttgtagctaattcttgctagttgttgcatccagagagctttgaataacatcattaatctactctttagccttgcatggtatgctatgaggctcctgttctgttcaagtattctaatcaatggctttgaaaagtttatcaaatttacatacagatcacaagcctaggagaaataactaattcacagatgacagaattaagattataaaagattttttttttgtaattttagtagagacagggttgccattgtattccagccttggcgacagagcaagactctgcctcaaaaaaaaaaaaaaaaaggttttggcaagctggaactctttctgcaaatgactaagatagaaaactgccaaggacaaatgaggagtagttagattttgaaaatattaatcatagaatagttgttgtatgctaagtcactgacccatattatgtacagcatttctgatctttactttgcaagattagtgatactatcccaatacactgctggagaaatcagaatttggagaaataagttgtccaaggcaagaagatagtaaattataagtacaagtgtaatatggacagtatctaacttgaaaagatttcaggcgaaaagaatctggggtttgccagtcagttgctcaaaaggtcaatgaaaaccaaatagtgaagctatcagagaagctaataaattatagactgcttgaacagttgtgtccagattaagggagataatagctttcccaccctactttgtgcaggtcatacctccccaaagtgtttacctaatcagtaggttcacaaactcttggtcattatagtatatgcctaaaatgtatgcacttaggaatgctaaaaatttaaatatggtctaaagcaaataaaagcaaagaggaaaaactttggacagcgtaaagactagaatagtcttttaaaaagaaagccagtatattggtttgaaatatagagatgtgtcccaatttcaagtattttaattgcaccttaatgaaattatctattttctatagattttagtactattgaatgtattactttactgttacctgaatttattataaagtgtttttgaataaataattctaaaagcatatactaagactcattcactttattcaaatatttgtgtgttctgtgtgccaggcatgggactcgttctaaggagaaagcagtgagcaaggcaggcatagtctgcctatataaagctcccaatctgaggaggataggcaactgaccacgcagtgtgaaccggggagcctattgcacaaccagtctgataatgctgcatctcagtctaaatatcctagtagtgtttcttagtcgcctcctgacgaaaaggcaaatatgaatgttctttctttgggcctagaaagtgatctagttgacatttctagcctaaaagatctgtactagaatatgacaagtgcaaagatcctggtatcctaaatgcaaagttttttacctgtttatcatatttttaaaataaattcagtcctctggagttttagtctcttttgcctagattttaacaaaatgcattttgcataaatatagtggagtcaaagtttccacaaagattataatgactcagaatttggtaagtaaggagatctcataatagacattatcctctgaaaaatccctttgccattaaaagtacagcatacacagttttatgtacaacagtatgtagaaatatatactttcattgtgtatgatccaaaagcagtggttcttaaccaggggtgattttgctgcctcacttgatattttcaaaataaagttattgttattttgatgggaacaaaatggtatcatgtctcattttaatttgtacctcactaattactagggagattaaatgttttagtatacacttgttagtcagtatgattttctctgatgaactgcctgtacgtattctttgctgatatttctactgatcctttgttggttatgtaacatcttagctaacatcttttccaattctgtagcttgtctcttcattctcttaatggagtttttttggttgacagacatttttattagtgttttcattaaggttaaatctttcaggtagggattttcccttgttcctaatgtcactcagttaagttttagttttccttgcagagatcttgtatagttttactatgtttattcctaagcactttgtttttttaaatgttcttataaaggacatttttttcataagtttttcctaattattactgttagaattaaaattagtttttacatattgatttttctatccagtaaccacagtaagctcttttaattctttctagaaatatatctggattcttttggattttctatatatatagtcatatcatctatgagtaatgtttggattttctatgtatataatcatatcatctatgaataatgtcagaaatggaattgttagatcatattccaatctatactgtttgctttttttttttccttgcctcattttactggctaggacctctctttagcacaatcatcagtagaatattgggacattctagtcctgtgcctcatctcaaagataaaagtgtaagtgtttacctttaaatttactgtttgctgcagggttttgttttgtttttttttaatgtgtgtatttcccttatcagattaaagaagttcctttctgtccctaggctgctgtgaggttttattacagatggtgaattttagcagtttatctgcatttattgatgatgattattttccttgaatctgttaatgtagtgaactacactgtttgattttctaaggttaaatcatcttatactcctagtataacctcaactgatccattttatctattgctttattttgcttgcaaacgttttggttagtgtttccaagtgggatttcctttccagcatttcttgagaaactttttgttttcccaaattttgaatcccaagaaaaatcagtaataaaatcaggaaaataggaaagatattataattctccggtgagaattaaagcttagcaatcaacatagacacattgctgatttgaaggaatccagcaacacaaacagcactgaacactgagacatagtattaaaggttaaggtcagtattcccatactgggacagaaacataggagagaagtggtcatgatcttgcttattagttcttgccatgatataagtgtgtgttcatagccggtatactactaatggtgagtcacttaaaaacacccacacacacacaacaaaatttaccatctcgtttttaagtatacggttcagtagcgataaaatacatttccagtggtgtgcaaccaacctccagcacttctttaaccttacaaaactaaaattctatacccattaaacaactccccactcctctattcaaccagcccctgagaactactgttctaccttttgtctctctgcatttgacattcaaggtactgtaccttttataagtagaatcatgcaatatttgtctctttgtgactagcttatttcacttagcataatgtcctcaaggttcgtctatgttgtaatatattgcagaatttccttcctttttaaggctgaataatattccattgtgtatgtgtatatactgtatatattttatttatccattcatccatcagtggatactagagttgtctctaccctttgactattgtgaatattgtcactatttacatgggtatacaaatatgtcttcagaactcttttttctttatacccagaaacggaattgttggatcatatagtcattctatttttaactttttaaggagccaccatactgtttttccacagtggccgaaccattttacaactccaccatcagtgcacaagggttgcaatttctcaacatccttatcaacacttattttctgtttttatgttttgagtagcagacataatgggtgtgggtgactcttacaagtagaagcattgtatattttacacaaatcctataaatggtattctaagttttagaaacaaaaaatgtccttcaattgacggtttcaaaacctgattctgtgtattgttgttaaccttgttaggagatcgtaacgttaggttacttgaaaactacccaaaatgttccctactgtagtgtttgaatatttaatataaacttataactctttgtaacactaaattttattcattcattcattcattcattcattcattcattctgagatggagtcccgctctgtcgcccaggctggagtgcagcagcacgatctcggctcactgcaacctctgcctcccaggttcaagcgattcccctgcctcagcctcccaagtagctgggactacaggtgcccaccaccatgtccagctaatttttgtatttttcatagagacagggtttcaccatgttggccaggctggtctcaaactcctgacctcagtgatatgcccgcctcagcaccccaaagtgctgggattacaggcgtgagccactgtgcctggccaataattcttatttcttaaacagtgtttttagatttccatgattatgagagttgcaaaggttttaagacagaaaaaggaaattagctgtttgccagatttattttaaatcattgcagtgtaaagcatcatggacaagtggacttcacaggcatttcaaagatgaaaaggacaaaaacacagaaaataattgtggtaagtcagtgccatctatgaaatgataccaattctacaaaaactcttcataatattagaataacccattttatgaagccagcatactcaaaaccagacagagaattacaagaaagatgccgggcacacatctgtaatcccagcactttgggaggccaaggtggcaaatcacttttaagtcaggattttgagaccctggccaatatggtgaaaccccatctctaccaaagatttaaaaaaaaaaattagctgggtgtagtggcacatgcttgtaatcccagctactcaggtggctgaggcacaagaatcacttgaacccaagaggcagaggttgcagtgggccgagacgtgccactgcactccagcctcggtgacagagtgagactgtctcataaaaaaaaaaaattaaaagaaagaaaactaaagaccaatatcctccatgaacattgatgtaaaaatcctcacaaaatattagcaaatcaattctatcaatataagaaagaggtaaatcatgaccaaatggcattattccagattgactcaatcaatgtaactaaataaaccatatgatcatgccaatagtgcagaaaaagcttgtgagaaaattcagtactcattcatgataaaactcatcaaactaggaataaaagacatctgacaaaggacatctgtgaaaaacttacagctcacgtcatatttaatgatgaaaaccttggttatctccaaagatcaggaacaaggcaaggatgccactcttaccacttctatcccacattgcactggagttcctagccatgcagtaatgtaaatagaaagcaataaaagacataccgttttaaaaaggaagaagtgggaggagccaagatggccaaataggaacagctccggtctacagctcccagtgtgagcgacgcagaagacgggtgatttctgcatttccatctgagataccgggttcatctcactagggagtgccagacagtaggtgcaggacagtgggtgcagcgcaccgtgcgccagccgaagcagggcgtggcatcgcatcacacgggaagcgcaaggggtccgggagttccctttcctggtcaaggaaaggggtgacagacggcacctggaaaatcgggccactcccacccgaatactgcgcttttccgacgggcttaggaaacggtgcaccaggaaattatatcccgcacctggcttggagggtcctacgcccacggagtcttgctgattgctagcacagcagtctgagatcaaactgcaaggctgcagcgaggctggcggaggggcacccgccattgcccaggctcgcttaggtaaacaaagcagccgggaagctccaactgggtggagcccaccacagctcaaggaggcctgcctgcctctgtaggctcagaaacctctgcagacttaaatgtccctgtctgacagctttgaggagagcagtggttctcccagcacgcagtttgagatctgagaatgggcagactgcctcctcaagtaggtccctgacccctgacccctgagcagcctaaccgggaggcaccccccagtggggcagactgatacctcacatggccaggtactcctctgagacaaaacttccagaggaacgatcagacagcagcattcgcggttcatgaaaatccgtggttctgcagacaccgctgctgatacccaggtaaacagggtctggagtggacctctagcaaactccaacagacctgcagctgagggtcctgtctgttagaaggaaaactaacaacagaaaggatatccacaccaaaaacccatctgtacatcaccatcatcaaagaccaaaagtagataaaaccacaaagatggggaaaaaacagagcagaaaaactggaaactctaaaaaggagagcgcctctcctcctccaaaggaacgcagttccttaccagcaatggaacaaagctggatggagaatgactttgacgagttgagagaagaaggcttcagatgatcaaactactccgagctacaggaggaaattcaaaccaaaggcaaagaagttgaaaactttgaaaaaaatttagacaaatgtataactagaataaccaatacagagaagtgcttaaaggagctgatggagctgaaagccaaggctcgaaaactacgtgaagaatgcagaagcctcaggagctgatgcgatcaactggaagaaagggtatcagcaatggaaaatgaaatgaataaaatgaagcgagaagggaagtttagagaaaaaagaataaaaagaaacgaacaaagcctccaagaaatatgggactatgtgaaaagaccaaatctacatctgattggtgtacctgaaagtgatggggagaatggaaccaagatggaaaacactctgcaggatattatccaggagaacttccccaatctagcaaggcaggccaacgttcaggttcaggaaatacagagaacgccacaaagatactcctcgagaagagcaactccaagacacataattgtcagattcaccaaagttgaaatgaaggaaaaaatgttaagggcagccagagagaaaggtcgggttaccctcaaagggaagcccatcagactaacagcggatcttggcagaaaccctacaagccagaagagagtaggggccaatattcaacattcttaaagaaaagaattttcaacccagaatttcatatccagccaaactaagcttcatcagtgaagtagaaataaaatactttacagacaagcaaatgctgagagattttgtcaccaccaggcctgccctaaaagagctcctgaaggaagcactaaacatggaaaggaacaaccagtaccagccactgcaaaatcatgccaaaatgtaaagaccatcaagactaggaagaaactgcatcaactaacgaacaaaataaccagctaacatcataatgacaggatcaaattcacacataacaatattaactttaaatgtatatggactaaatgctccaattaaaagacacagactggcaaattggataaagagtcaagacccgtcagtgtgctgtattcaggaaacccatctcacgtgcagagacacacataggctcaaaataaaaggatggaggaagatctaccaagcaaatggaaaacaaaaaaaggcaggggttgcaatactagtctctgataaaacagactttaaaccaacaaagatcaaaagaaacaaagaaggccattacataatggtaaagggatcaattcaacaagaagagctaactatcctacatatatatgcaaccaatacaggagcacccagattcataaagcaagtcctgagtgacctacaaagagacttagactcccacacaataataatgggagactttaacaccccactgtcaacattagacagatcaacgagacaaaaagtcaacaaggatacccaggaattgaactcagctctgcaccaagcggacctaatagacatctacagaactctccaccccaaatcaacagaatatacattcttttcagcaccacacctattccaaaattgaccacatagttggaagtaaagctctcctcagcaaatgtaaaagaacagaaattataacaaactgtctctcagaccacagtgcaatcaaactagaactcaggattaagaatctcactcaaaaccgctcaactacatggaaactgaacaacctgctcctgaatgggtacagtacataacgaaatgaaggcagaaacaaagatgttctttgaaaccaacaagaacaaagacacaacataccagaatctctgggacacattcaaagcagtgtgtagagggaaatttatagcactaaatgcccacaagataaagcaggaaagatccaaaattgacaccctaacatcacaattaaaagaactagaaaagcaagagcaaacacattcaaaagctagcagaaggcaagaaataactaaaatcagagcagaactgaaggaaatagagacacaaaaaaccgttcaaaaaattaatgaatccaggagctggttttttgaaaggatcaacaaaattaatagaccgctagcaagactaataaagaaaaaaggagagaagaatcaaatagacacaataaaaaatgataaaggggatatcaccaccgatcccacagaaatacaaactaccatcagagaatactacaaacacctctatgcaaataaactagaaaatctagaagaaatggataaattcctcgacacatacactctcccgagactaaaccaggaagaagttgaatctctgaatagaccaataacaggatctgaaattgtggcaataatcaatagcttaccaacaaaaaagagtccaggaccagatggattcacagccgaattctaccagaggtacaaggaggaactggtaccattccttctgaaactattccaatcaatagaaaaagagggaatcctccctaactcattttatgaggccagcatcatcctgataccaaagccgagcagagacacaaccaaaaaagagaatgttagaccaatatccttgatgaacattgatgcaaaaatcctcaataaaatactggcaaactgaatccagcagcacatcaaaaagcctatccaccatgatcaagtgggcttcatccctgggatgccaggctggttcaatgtacgcaaatcaataaatgtaatccagcatataaacagaaccaaagacaaaaaacacatgattatctcaatagatgcagaaaaggccttggacaaaattcaacaacccttcatgctaaaaactctcaataaattaggtattgatgggacgtatctcaaaataataagagctatctatgacagtcccacagccaatatcatactgaatgggcaaaaactggaagcattccctttgaaaactggcacaagacagggatgccctctctcaccactcctattcaacatagtgttggaagttctggccagggcaatcaggcaggagaaggaaataaagggtattcaattaggaaaagaggaagtcaaattgtccctgtttgcagatgacatgattgtatatctagaaaaccccactgtctcagcccaaaatctccttaagctgataagcaacttcagcaaagtctcaggatacaaaatcaatgtacaaaaatcagaagcattcttatacaccaataacagacaaacagagagccaaatcatgagtgaactcccattcacaattgcttcaaagagaataaaatacctgggaatccaacttacaagggatgtgaaggacctcttcaaggagaactacaaaccactgctcaacgaaataaaagaggatacaaacaaatggaagaacattccatgctcatggataggaagaatcaatatcgtgaaaatggccatactgcccaaggtaatttatagattcaatgccatcctcatcaagctaccaatgactttcttcacagaattggaaaaaactactttaaagttcatatggaaccaaaaagggcccgcatcggcaagtcaatcctaagccaaaagaacaaagctggaggcatcacgctacctgacttcaaactatactacaaggctacagtaaccaaaacagcatggtactggtaccaaaacagagatatagatcaatggaacagaacagagccctcagaaataatgctgcatatctacaactatctgatctttgacaaacctgagaaaaacaagcaatggggaaaggattccctatttaataaatggtgctgggaaaactggctagccatatggagaaagctgaaactggatcccttccttacaccttatacaaaaattaattcaggatggattaaagacttaaacgttagacctaaaaccataaaaaccctagaagaaaacctaggcattaccattcaggacataggcatgggcaaggacttcatgtccaaaacaccaaaagcaatggcaacaaaagccaaaattgacaaatgggatctaattaaactaaagagcttctgcacagcaaaagaaactaccatcagagtgaacaggcaacctacaaaatgggagaaaattttcgcaacctactcatctgacaaagggctaatatccagaatctacaatgaactcaaacaaatttacaagaaaaaaacaaccccatcaaaaagtgggtgaaggacatgaacagacacttctcaaaagaagacatttatgcagccaaaaaacacatgaaaaaatgctcatcatcactggccatcagagaaatgcaaatcaaaaccactatgagatacatctcacaccagttagagtggcgatcattaaaaagtcaggaaacaacaggtgctggagaggatgtggagaaataggaacccttttacactgttggtgggactgtaaactagttcaaccattgtggaagtcagtgtggcgattcctcggggatctagaactagaaataccatttgacccagccatcccattactgggtatatacccaaaggactataaatcatgctgctataaagacacatgcacacgtatgtttattgccgcactattcacaatagcaaagacttggaaccaacccaaatgtccaaaaatgatagactggattaagaaaatgtggcacatatataccatggaatactatgcagccataaaaaatgatgggttcatgtcctttgtagggacatggatgaaattggaaatcatcattctcagtaaactatcgcaggacaaaaaaccaaacaccgcatattctcactcacaggtgggaattgaacaatgagaacacatggacacaggaaggggaacatcacactctggggactgttgtggggtggggggaggggctagggatagcattaggagatatacctaatgctaaatgacgagttaatgggtgcagcacaccagcatggcacatgtatacatatgtaactaattcgcacattgtgcacatgtaccctaaaacttaaagtataataataataaaataaaattaaaaaaaaaaggaaaatccatagctcctgggtttatttaagtaacccttactcagggttagcctgctaagggacttctacacaaggacaaataacattagactgtacctagaagttcccttgacaaggtgaagggagcacaggccagctgctttactttcttactcctcaagcaggacttggtgataaatgttatatggaatgtcttggagagtaaatagtcatggatataatttctcaaaaaggggtaatatttgacagatttcatgggggaagtttatttgctgtgaattgtcagatctagcaggcacagtagatacccattacatgagacatttgggaattatctccagcagatttgaaaagcacaagtaagttacacagcaagagccctcatctccacgtcacctaattcagttgcccaaatgcttctctctcaggccacactgatgatactgactatggtatacctatggtacatcactcaaggtagagacgttccctacgaacttgggccttgctcatgaatgagttggctcaagctaaaactgcattgatgccttactacagctccacttaggtatagccctaaagaacagtgctaagggaaaatcctagtgggcaaagctttgagcactatacttggtcattcacttcttattgagagagaagtagccttaagtagagatacacatggattcttgggcagtggcaaattgactcattggtcaggtacttaacttggaaagggcaaaattagatcagagacaaggaaatctgggaaatgtcataacaattgacttataaggtgtggatcttcacatatcacttttatgcttaccagagagcatccactacagaagagacattaaacaaccagatgtataaggtgactttggcactgagggccagccaacatgctcttggccaccctagtgcttgtgcaattagctcatctacagaagagtcatgatggcatggatggaagccaagcgcccaaaatcatgggccttttctcagaaaaactaatctagctgcttccactgctgaatgacacttggccttgatatgacaccatcatttgaaaagaccaatcagttctttggtggcaacatgattatatcagacccattcttgtttggacattgcagcaattcattcttaacagggattactacttggtccaggtatggatttgcctttcttgactatggtgactcttatcagaaccactatctaaggacctataaaatgcatgatttactattatgggctttctgaccaagggaccaattttacagtaaaggaatttaaaaaatgagtagagtatatgacaatggaaaacactagtcctatcatatgccacacaatccagaaactattagaatgttaaattggcctgttaaggagtaacctaaggttctagcttaagtatgacatgcagctaggttggagcattttcctccaggatgtgatatatacattgaaccaagggccattatatggtgctctgtctaaataacttaaatagtgttatgacatatgggtccaagaaccaagggatggaaattaggttggcccctctcaccactactctcagtgatcccttgggaatttgtgcttcttgttcctacaagttgagactcagcagaactgagtccatgtagccactggatgcatgtatcctccctgtatccagtgagggaatggttcccctggaggtcacaataaggattccactgaacctagaactatgattgctacctggtcatgtttggctcctcatgctggtagataaatatctggtttctctgtccactagtaggaaaattctgaagtacattctgtatggttcctcagagcattcctagcaaactgaggcctggatacccacagtaataacccattcttaacacaaaagttttttggcttttctcccttccctgtgtcactttctctaatttctaatttctctaatttctaattctctaatttctaattctctaatttctaatttgtgctttctgggatcatctccgaaataaactatctgtaccaatgtcttatggtttcctttgaaaggaatcactaagattgttccttttctctttgtgttgattttaaatgtattcacaaattctttgacaatcttccttttaagagatagagcttaattcccctctccataagtataggctggacttgatgcatttctaattaatagaatagggcagaagtgatggtgtgtggcctctcagactagttcttaaaaggcattgcggcttcctccttgctctctctctctctctctctcaggttgcttgctcagccatgttatgaggccactcaagctatcctatggggaggtctaagtatcaaggaattgaggcctcctgccaacaactgttcaagtgtaccatcttggaggcagattctccaacccagtcaagctttcagatgactgcagccctggccaaaatctttactgcaacctcctgcgagacttcaagccagagccacccaactaaaccactcccagtttcctaaccctcagaaactgaatgagataataactgttgctttaagctgctatgtcttggggtaatttattatgcagtgatagaaaactaattcactgctctaacctggaagaaagggaatgggaatccaaagagttgtattgcatgcagagtagtgaaggcaaatcgtaggccccaaaaaaactgagattaggggaatgatctaggaaggaaaatgaaaaaaggaaagggcaacattgatgaaagcaagtaaagagaaaaatgtaaacaaggaaagataacattataaaagaaagaaataactatgacataaaataggcagtaactaagtgtgagagaaaccgagaattgcaaagacaaactagaatgagtaagcagacagagaatcaagaggaagaaagaaaaaaggttcagtgaagaaaaaaatggagtaatgagaggataaacgtgggagaggggatttaaagaagcaaggcacactaggatatgggataaagggaccgagagctctgccttccatgaatgcactaaatgcctcaagtaaacatgcaaaataatcagtctgaagcttcttgcacctaaatgtagtctctttacttaagtgtgactgttagaatactacagtttctcagaatactaggaataatttctatatttgccatgatcattgtattcagtccagtgttctatttctgctcaatcttccttacttaactgagctagattctgtgcccagaatatatacacaagttattccagtcagaatacactatctcttggctataactgatggatggaaggctcaaagggctataactcagaatagaaataaagtactttatagtccataagtagaatcaggcgttaatctagttacatttggttcttgataaacattttcatagtaagtatcatctggtattcccatttgcatctttgatatgtctcctccatagttatatatgtttttctgtgcttgattaaacctgaatcctaaagagaagtgacaaatgattagaaagataccagatataataagatgctcactcaaaatgctactgtgttgtggtctgttccacattccttttcaccattcttaaagcaaatatcttcacctgaaaccagaaacaccccaaatttctgagttcatcccactttcactcccacatatcactgtccatccctacaaaaggctctgcaggacctgggttttaggtctgatctactaataactagctgtgtaatttgggacaaattatttaacctaagtcttagtgctctcatctgtaaaatggggataataaccgcacctacctcatcatattcctgcaagagttaaatgtgacagtgcatgtaaagaacttagagcatctggtatttagttggtgctctgtaactattagctaacttcttcattcacaaagggagaaatgcccttttcctctcaagagctcatgtttctcaatctgctctggatttaccttctcttgcttcttgaagaagtgacacacattatcctcttctccaatgccaacatcttcaatgtatcaccttcactggcttcagttatgcaaatctccactacttaaaataattttcacttgcttttatgctccttccaactaccatcctatatctttcttcttttcacagtaatctcttttaactcagtaacttatattgtttccttttttttttttttttttgagacagggtcttactctgttgcccaggctagagtgcagtggcgcaatcgcacagcctccacctcctgggctcaaacaactctcccgcctcagcttcccaagtagcaaggactacaggtgtatgccaccatgccctgctgacattttattttttgtagagtgagagtctctttatgttgcccaggatagtcttgaactctttgcctcaagtgatcctccaaacttagcctcccaaagtgctgggattacaggcatgagccattgtgctgggtctctgtgctgatttaaatttgtaaaagatgactatctattgagcagagaagggaatggagaagcattggtttggaggctattgcagaagcctgtagaggggtgaaggcaacttgggctgagtgggtggcagtgagctggaaataggtggattggttaatgctaaggatggctcatattaatggagtatgcattatgagataggcactattctaagctctgtgcatgattatctcattatctcacaacctatgtgctaggtactaccgttattcttcttttactagtgaagaaaccgagctagtaacttgcccaagatcatatagccagtaaagagtggagccaaaaatcaaacccaggcactctgaatcaagagtccacaatcctttgggaagccaagatgggcagatcacgagtccagcctgggcaacatggcgaaatcccatcttgacaaaaatacaaaaattagctgggcatggtggtgtgtgcctatggtcccagctacccaggaggctgaagtgggagaattgcttgagcctgggaggcagaggctgcagggaactgaggtccaggccactgcactccagcctgggcaacagagtgagaccctgtctcaaaacaaaaacaaaaacaaacaaacaaacaaacaactccacaatcctaacctctttgctttactgcttctcctatctgctagtaggacagaactcatacaccatcattaggctttggctatgttaaaattattggcgtttctggggtctgatgacactcttcttcaacatgctggcttttacttttagcatttcagtactgctaactactggcagaacaatagtggcctagaacctaaaaactattttcaacattttgaggcatttattttgccaagtgaagtctgctcatgaaaaattgttactaaaactataagtaactttttttcttcactctgtcacccaggctggagtttagtggtgcaatcttggctcactgcaacctccgcctccctgttcaaacgattctcttgccacagcctccgagtatctgagattacagacatctgccaccatgcacagctaatttttgtatttttagtagagtcagggtttcaccatgttggccaggctggtctcgaactcctgacctcaggtgatccatctgcctcagcctcccaaagtgctgggattacaggtgtgtgccactgtgcctgaccagtaacttttaaaaaaggattcatattttggctaggcgtggtggctctcgcctgtaatcccagcactttgggaggccgaggtagttggatcacaaggtcagcagatcaagaccatcccggctaacacagtgaaaccctgtctctactaaaaatacaaaaaattagcggggtgtggtggcgggtgcctgtagttccagctacttgggaggctcaggcaggagaatggtgtgaacctgggaggcggagcttgcagtgagccaacatcgcaccactgcactccagcctgggcgacagagcaagactccgtctcaaaaaaaaaaaaagattcatatttttaaaatcactttattcaaacttaaataatataggacatttccttctattcccaaataacaatcttacatacaaaggtaaaaatgacttgacaaatgcatctaaatttatatactatgcagattactgaaatgttaaatgcctagaaatacgtgtgtggaatgtattttttgttcatgagaatttcctataaagtactgctaaaaatcacctacctttgaagttagccgaagagttgcttgtagcaatttccttccagctggcaatgtacctaagcacattatatgaggattcattaaatttaatcgattcattagtacatacttagac

SEQ ID NO: 5680 - DNA, 50172 bp, Homo sapiens
  LOC120376 gene - 110674775 - 110684946 of chr11; NCBI Entrez Gene ID: 120376; Build 35; sequence includes 20,000 bases upstream of initiation codon and 20,000 bases downstream of termination codon of the gene
agccaactttgtaattggtaaaagttcctaaagaagaaatgggtttcctcagagggtgctaagttctgtgtgcctggatattagatgcacctggtgttagtaatatggagagaatgtaatcattgaatgagactctataaaatttcttccaactcttgagagtctatagaatcattaaagtcactgcaaaagagctcggattcaatgaactggatgttgaggattcttaacttccacagaagctacaccctctccacttactttgctccaggacatctcggagccatgatttgcgtattttaagactctacacgcctagatactcttccttcagaggtcagcttaggcactgcatcctgcaagatgtgtctcccaccccattcttgacaccagtttaggtgcccgcatcaccccatctttccctgaccctgccacttctcatactacaccgaatattctgttttgtcatcaatcacccctgtattggtgtcttagggctgcagtaacaagttaccacaaatgggatgacttacagcaacagaaatgtatcatctcatagatagctctagaggctagaagtccaaaatcaaggtgtcagcagggccatgctccctctggagcctctggggagaatccttccttgcctcttcctagctggcagttgtcactggtgatcctcgatgttccttggcttgaggttgtatcactcaaactgctgcctttgtcttcacatgaccttgtcccatctgcatctgtgtctttgtgcgtccctctcctcttcctattaggacatcagtcacatgagatttaggacccaccctaatttaatatgacctcatcttaatttaagtagttacatctttaacagccctattagcaaataccgtcacattcacaggtatcagggattaaggtatcaatataactttgggtggcttatgcctgaaattccagcaatttgggaggccgaaacaggtagatcacctgaggtcaggagttcgagaccagcctggccaacacagtgaaacccatctctactaaaaatgcaaaaagtagccaggtgtggtggtgcgtgcctgtaatcccagctactcaggagactgaggcaggagaatcacttgaatccgggaggtggaagttgcagtgagccgagatcgtgccattgcactatagcctgggtgagagagtgagactccatctcaaaaaaaaaaaaaaaaaatatatatatatatatatatatatcttttggagggggcacataatgcaacccaccacattccccaacctctccctgctctctagcctgtgggttctttgaagattgtgtcttcattccacatatttttcttacgtctattatgaactacaccctgttctaggcactgagggcacatcacagtcaaggtccctacagttggtggagcttcttcctccacatggattcagacagtaaacattgaagtggcccttcagtgctgaagccaaacactaagtgcatgtatgcacatacacacatacagtaggcgccccttagccatggtttccctttctgaggtttcagctactcatggttaactgcagtctgaacatactaaatgcgaaattccagaaataaacaatttctagatcttaaatggcatgcctttctcagtggtgtgatgaaatttcattcagtcccactctgtgctgcccaggacttgaatcttacctttgtccagccaatccacactgtctacaccacctgcccgttagtgtctcagtagccgactcagtgattggatcacctgtctctgtatggcagtgcttgtgttcaagtcacccttattgtatttcacaatggcccgaaagcacaagagtagtgacactggcaatttagatatgccaaagagaagccggaatgtgcttcctttaaatgaaaaagtaaacgttctcaacttaataaggaaagaaaaaaaatgtatgctgaggtcagacattggtatggtaagaacaaatcttttgtctgtgaaattgtgaagaaggcgaaagaaattcatgcgagttttgctgttgcacctcgaactgcaaaactgtggccacaatgcatgataaattcttagctaagatggaaaaggcattgagtttgtgggtggaggacatgatggcaatcaggtgtggtgctatcctcagttttaggaacccactggggagtcttggaacatatccctcgtgggtaaggggaggctactggatatgcgtatatatagtcacttaatatatattggatgagggaatgttaactggaacagtagaagatgaaggataaattactacatttcatccagccagtgctttctggcatgtttatcaaaatgtaaaagtgtggttgctctttgtcccttgtaaaactttgttctatggtacttgaattcttattctcagttgacctgagggtcaacccaactccccagataatacttctgaatatcataaaaccaagcttataaggtgtattcctaatttttattaaattcaaacttacaactaaagaaaacacttgaattctgtttaccttccagggcagcgtcagttcctctcagtctccatttgtgcagatgccaggtgagtactttaattcaataagcaattattcccttttgaatttaaatcaagcatctgggcttccattctttcataacgaccttacaacacttccaaaactctgctcctttaaaatagttttgtctaaaatacaaaatcagcgaaggacagaactcatgcagtaatttctgaatttaaaattcattttgtcttgaaagcagcccttttatcccaagcttttggggcaaaggcaatataaattatgcccttgatacagttttaaattgtctaaagttctgacaccatgatctgatagatgaggcatctgctttcaaacagaaaggggaaagccgtctgcgagcagagggagtcaggcatttggttcagtattttgaattcatttcaatgcctatgtctcattaaatactcctgtggggatgtaaaaggggaattcctaataatactgttggacattcttgtataaacacacaccacacaggcaaagacaatctcatttagttcaactcagacgcggcacattccctaatagttttatcaccttcagagctggataagggaaaggaataagagcaatcgaggatcccgaatatttaaatgtctgtatgttgtttcccaatcatatatagtgccattgaaatttggtggcatctcctgccttctacagaaaaaaaaaagaaaaatttccatagcttctctttatctagaaattatcctttctctttgtacagagaaaatccatgctaagagagcagaggcttttttcttcgtggttgttttgatttggaaattgggagtatagatgagagcctggaaaccttgttttcatattctcaaccttaaccgctctcataaatataatttcattgtatgaaacagaaccttatttatttatattaaggttcagctgcacagattttttcccaaggaagtatgcttataatgaaaaccctaacttcagctttcaaatgcatgagcaggttagaagttatagaatgtaagatgaaagtgaagtgagtggagtcgtgccacaggttttgatggggaattttgatttcttcttctggatgaataaattcacatgccattcttgaacacaatgttatactactaggtttaaagaaaatgtataaggcatgagatctgcccccttgggctcgcaggttgactggaaagatcattgtgactcaggtgaaagaggaatgagcataatataaagtgccacatcctgtggaacgggctggaattctgtgtctatagaatcagaagctcagaagtggtctgctgctgtggttggggtaaggtaaggaagacaggcacttatatcttctccccagttcagcctttttgtgacctatgacctaagggtgttggtgttagcattagatcacacccaaggccagctggaacaattaaaccatcagttttatagacctcaagtctatgccctcaaacatgttctgaatgatcagtgttttctgctacaactgagctacggggtcagaaagtgttgagcaaacacacctttttccttggaaaccatttcactgctgggcttaccttaaatgaagctcttatcagtttctgtccctccctctctccaccaaggaaaactttttactttttttttttttttttttgagacggactcttgctctgggcgagatctcagctcactgcaacctccacctcccgggttcaagtaattctcctgcctcagcctcctgagtaactgggactacagcagctgtgattacaggcatggtggcccagctgatttttgtattgtttttagtagagatgggttttcaccatgttggccaggatggtctcaatctcttgacctcgtgatccgccagcctgggcctcccaaagtgctgggattacaggtgtgagccaccgagcctgcaccaccaagggaaactttatgtagccggcactgtcttcctaaacgtgctgggccctggtgagttgagtgaaggagtccatgaggccacaagagggcagcaaataacataaaactcatcaaaaccctaaaactacaggcctctaaaattggcttctgtgtggccatctaatcctaaagaaagtcatttattgatgtctgccaggcgtgcgacccagtgtaaggtcaatgtgtgaagaattagaaggcagagtacagcctgcctctttgaggtggggttatatgtgttaccttatccagacatagcgatctcagataacaggccaggagcacctcttgttaacagttctatgtatatggagaggtagctccgatgttgtgaaaaagatgcttccttggttaaaatatgaatgccaagagattatttcatttatgtcttcctagcacagcgccggtcaccgggaaggtactcagtaaatgtgaatgaatgaacagacacggtactgtctaaaatgaactcacccctaaaggcgacaatgttttcaaacgttagttatttgggctaatgcaggaatatttcacgcttttcaagacatttctctatttccatgttagcgttggagtcaggcacgcgttagtaacatcgtttcccaggcagagactcagctgcaaccgaggccttgaccgccctgggaggaattttctgcccatgtgtttttcatttggcaacaggttcgccggtcacgtcaggttactacggtgtcagaagatctttcttatctgactcagacttccacaacagtaaacagttttcaaatgacgtctacacctccagcgtggggaagccgtttccctgtgagtcctccgcagggcagagccatgcggctctcctggagccctacttcccccaggagccctacggagactaccggcctccggcgctgacgcccaacgcgggctctctgttcagcgcctcgcccctaccgccgctcctgccaccgcccttccccggagacccagctcacttcctatttgtgagtatgcagagacctcgtgtgagggagtaaaagaggggcgaggctcgccctctggccagccgctgtgcttggcatccgggttgaagccaggtctggctcaccctgtagactccagaggctgctttgcagctgcctagagatgccaggacaccctccgagggagccttgttcaaggatccctgttagccatgacagccaggagcgtctacgcagggcttggaaccgggaggaatgtgcagcaggatttatatccattttgttaatgctctactgatattgcctgatgttcccccaccctgttagtgccagtcgtcatcattcctgcagcccctaaggaaggaacactgaagctgcatctcagacatgctaggcagtaatgagatggatcataatctcccaaggagggtacatagggctcctctttctttccaagtcccctgcctccccttccccacatttttagcctaaaaatccttgttctctctcaatccttccaaacaggtgagttcataaagatctgaagattgctaatgctcatagagaatagtaaaggtttctaccacaaagtaatgaagctctaaagacaggagtttagacaaaagggagaggatgagaattcacattattaagtatactctatgccaggaaatgtgatgtgttcattcaatacttgcaacaactcaggatatatttatgaaagtcccattttacagatgagcaatgtcgggctcagagtcaggaggagccacgaatgaatccaaatctttctagctccaaacttacgggattcctacctctttcctcctgctttaatgaggacagagtgggcttctcagtcccctcaaaaattcaccatggagttgaaggcctactccgaggagtgggccaagcgctgaccttccccactgtgtaaatggcattctaggacccagactaatgggagactcaaaaagaatccaagacagagtgcattgcacacagtaaaatgttgcatacatgtgcattttattagtctcacatttcactcatttaatgttgtcttctgggaaaaggaatctcaatatctatagcaaatctaattctagagtaggaagggaggaaaactttcactgctggtgtcaaaagccggagagaagagcagcctgagagccaggcttcaggcagcagagagaggggacgaaggctgccctgaagccacagtctggcagcacacaatgtatcatcagagtgtcacctagtgaataacctccgtggcctttccattctcctcagagggactcatgggagcagacgttgcctgacggtctcagccagcctgaccctgtgtctgccgatgccctgctgaccttgccacccagcacgagttgcctctcccagcttgagtccgggagcatcgcccagcacaggggctcaagctgggggtcatccctggctggggctcagtcatactcgctgcatgctctggaagatctgcaccacactccggggtaccctaccccgcctccttaccccttcacccctttcatgacggtgtcaaatgacctaccgcccaaggtggggccactctccccagatgaggaagcagacaccggttccctccatgacccttccccttgggtgaaagaagatgggagtattgcctgggggtcatatgaatgccgcagagcttattgaggggagggccaaatgacttctgggtttttctttaacttgaggtgtattccaaagattgttttaggtgtgtcagcccattcaggactggattttcagaataagcctcaatgctgctctttgttagtggacgagggcatttatttgtaatcctctccactgtaaccccactgaaataaaacagaatgttaattaaatgtgtcagagaccgtattctagtaagataaccttacaatgtggtctttttggaactgttgtaacccattacgttctgaatcttctgttatctttgaagtatcatttttggcactgatttttcttaaattacattaaaaagtttatgcagatcataaaagatactgattttcctgtcagatgtttcttagttttaaactatgtgtattctgcagtaaaagacactggataggatataatatagatatgaccacataaaactcattttatagcatgtgacttgaaagagtgaagtgtttcatatacatatatttatggcttattatagtgacttgtaaaaccccagttaaaaaaaaggtacaatctataaatatgttattgtccataaaataggatgagatcaggaaactatggctttgtacataacaaagttattttttgactctatcctaaagcccagaatgtccccaaattagttcaatccaaaaaagtccaaaaattttctttgatcagtgatggccttaattaaaccagacattgtctctctgatggaataaacctacagttatcagcatgaatgagtaaaataggcattctgtaatcaaatggaaattttttttttttttgagacagggtctcactctatcacccaggctggagtatagtggtgtaatcatggctcactgcagcctcaatctcctgggctcaaggaatcctcctacttctgcctcccaagtagctgggacccaggtgtatgccaccatgcccagctagtgtttttattttttactttttttttaaagtttttgtagagacaatgtcttactatttgcccaggctggtcttgaattattgacctcaatctatccatccaccatggccttccaaagtgttaggattacaggcgtgagccaccacacccaaccaaattcataccctttaaagaaaatacagaaaataggactaagctgttggcaagaaacagaccacaaaacaccaagaagcaaaaggactttggagaaggacatattgccatgtgtgagccgatggcttgacaaacagcacctcctatttggtggcttactagtcggaaaagtgcagctcttactatgtgtcaatgaagatattgacatctgaagcatgaatctgtccacattggattggtgtgggttcctttgctaattgggttcccagcataattccagcatgcctatctgcggccaagctcatcatacatgcctggtatacactgagactttgcagatgcatgagtggaggcccccgggttgtacctgcacccttcttcttagcttcctaccacctgtctttctgcacttcattctcacatcttttccaccctctggtccctcctgatccaatgccatttctctccatcttctggaggccaaggccttcattttccctctagttgcccaaagaccctcaacacaatctccatcacatcctctgtgactgtcccatactctacctcagcaaggtagaagcccagaaattccaacaaggggattaattcacacttacaagcaaataattgatattccttttttttccaggccttcaaggtattttctggttaagcaaactcacttctagtttatggagtgccaccagaaatgcttgggtagtgagctttcgttcacctcatcctttcggctccctccaggcagagcattcttcagggagtagatcaagagtgaacgcgtggggctctctgctcctgggcagcactgccaggccccctgccccacttcctccccctccaccagctcctttgggcagcctgaactttgctttgcttagtgcttgctcttcagtgaaaagtggcaacattcacagtgcaagaaaggagctgttctttcctaaatccagcatgacttgcaacctcagtcttggttcccaatatggctggtagaaccatctgtcattcagcagttactcatacctgaagagcaggcctgtgcatcagaaagaagagatctggccctctctgcagatatagaggtcttcacaagggtctcagggtcattttcctagattggtgttgtaaagtttaaaatgatttgtcctctactgcttaccattttactgggtatcagtaacacagtagtggctgtgtaaatcatgaatatgtgtccacataactttaactttcatgtgattatgactctgaatttttgtttgtttgttttttgtttttttaattattattatactttaagttctagggtacatgtgcacaacgtgcaggtttgttacatatgtatacatgtgccatgttggtgtgctgtacccattaactcatcatttacattaggtatatctcctaatgctatccctccccgccccaccccatgacaggccccggtgtgttatgtcccccttcctgtgtccaagtgttcccattgttcaattcccacctatgagtgagaacatgcggtgtttggttttttgtctttgcaatagtttgctgagaatgatggtttccagcttcatccatgtccctacaaaggacatgaactcatccttttgtatggctgcatagtattccatggtgtatatgtgccacattttcttaatccagtctatcattgttggacatttgggtttgttccaagtctttgctattgtgagtagtgccacaataaacatacttgtgcatgtgtctttatagcagcatgatttataatcctttgggtgtatacccagtaatgggatggctgggtcaaatggtatttctagttctagatccttgaggaatcgccacactgtcttccacaatggttgaaccagtttacagttccaccaatagtgtaaaagtgttcccatttctccacatcctctccagcacctgttgtttcctgactttttaatgattgccattctaactggtgtgagatggtatcccattgtggttttgatttgcatttctctgatggccagtgatgatgagcattttttcatgtgtctgttggctgcataaatgtcttcttttgagaggtgacactgaatattatgcatgttcacgtgttccttcatctcctaacaacttgaagatgcactggctctcagacaaagagagctcaacaaccagaccttggaacagaggtaaatacagggagcacgacaatgtttacattcttcttaaagcatcctatccctttcatagcatttgactaaattaacttataaaaaagagacacactcaggcccacatatgcctgctagtgtccacttcagttatctagtctaaaaggggtttggggagtagggctggtgctaataattccaaataataagtgatcttcaagaattctgtttagtttgggctgggcgcagtggctcacgcttgtaatcccagcactttgggaggccgaggagggtggatcacaaggtcaggagatcgagaccatcctggctaacatggtgaaaccccgtctctactaaaaaatacaaaaaattagctgggcatggtggcaggcgcctgtagtcccagctacttgggaggctgaggcaggagaattgcttgaacctgggaggcggaggttgcagtgaccgagatcgcgccactgcactccagcctagcgacagagcgaaactctgtctcaaaaaacaaaaagaattctgtttagtttgacaatgtgtctctgttttacatatattttaatttgattctgttttattgttcagggaatactttgttaaaaggtgaaatcaaactacaaaattatgacaggaaaattaattctatttccttatccaaccccatttttctttcaattcctctctgttttctttcctttctttttttttttttttgagacagtcacccaggctggaggagggtggagggcagtgacacaatctcggctcactgcaacctccgcctcccaggtccgagcaattctccttcttcagccacctgaatagctgggattataggcatgcaccaccacacccagctaatttttgtatttttagtagagatggggtttcaccatgttggccaggctggtctggaactcctggcctcaagtgacccacctatgttggtctcccaaagtgctgggattacaggcgtgagccaccgcgcccagccaattttctacaacacgtggggactaatcgcaccttttcataacaatgtaccacgccaacatacaaaaataggtgcattcttctctccctcaccttccttaaacctgctattcactgacttacaactttcctgagaaagtcagagaaaattaaagagctctgtttcaacactccatctctttcaggtcttgtaaggacacaggatatatttaagacttaaagtaatcagagatggtatgtcaagttcaagccactaaagaaagctgactagatgataatgccaaaaagaaattgagcacaatttgcccatgcaaaagctgcaatatagacaatcatgccatgaaacacatgcagtatgtagttgaaggcatttgcattcctcttacaatattacacaaaccccaaaaaaaggagagaagaaaactacatctttacctcatttatttaataaatgatttcaaatgatcattatgacttgctatagctcagttaataatacaatttcatggtactattgggtaggaggagaagacagaagcactctaaaagaaattgcataaagggaaaataattactaatgccaatagtaaaacatacattgacatacatacatacatatatacatacgtacacacatgtataaaagtattatagtatctttgtgatcagtttttcgatatttaatgtaaatatctaaatagtgtagtcacaaggaataaaacatcagttatatttaaagtaccaaaataatgattgatgtctaaggtttaagtcacattacattatagtgattctaccaaccacacaccaaaattatactctttacttaaggctccatcactgggttctgtctacagtatcctctctatgcaaaacaatattacactgttcatctcacacaccatagactctagagaggttaagtgcaaaatcacacactctagacaaagtggttctccagctaaagagactcatggggaggactcatgagtggctcacctctgtgtcccagcacctggctcgaggcccagaacactgtagatgctcagtaaatttttgttagattgaagtaaaattataccataaagatgagtaactttttagcccttggttctatgggtgacagctctctgaaaccagtatctgagaggattctcaccatgtttagtatctaacattagccatactctctccaaattcagacagtaggtggatattgggctttagtggtaatatatttaagatgactggtttagtctttttagatacctttatgaaataaaattactgaacctttgaaatagcacagaaaaatgttgatatattcatttagtatgtacatgtactatgatctgttgctaagaaatcttataaataaaagttatttaatgtttgatcattatctctggtgtgactaaaacaagtatgataaatcaggaacaagaatccccaaaggtcaagctaaataaacattaaaatattctatagttatttgcaaatgatggcattatattatatttgatttttgatatggaagtatcctctgaccaggtgtggcagttcacgccgcctgtaatcccagcactttgggaggccgaagcggaaggattgctcaagcccaggaggtcaaggctgcagtgaaccatcattgcaccactgcactccagcctgggagacagaatgagaccctgtctcaaaaaagaaaaaaaaagtatcctctaattataatctctgataaataacatacgtgcatttgtaatatgcaatgtcattgttagtacaattaaaaaaaagaacagtaaaaaatgttagaagttccaagaggaatgaaatgtggaccaaacatacagtatctaggaattagctcttttggattaggaaaattgatagatatacctgctaaacttccccctaagaaaatatcttaacaggaataagcatgggcaaggacttcatgtctaaaacaccaaaagcaatggcaacaaaagccaaaattgacaaatgggatctaattaaactaaagagcttctacacagcaaaagaaactaccatcagagtgaacaggtaacctacagaatgggagaacatttttgcaatctactcatctgacaaagggataatatccagaatctacaaagaactcaaacaaatttacaagaaaaaaaaacaaaacaaccccatcaacaagtgggcaaaggatatgaacagacacttctcgaaagaagacatttatgcagccaacagacacatgaaaaaatgctcatcatcactggccatcagagaaaagcaaatcaaaaccacaataagataccatctcacaccagttagaatggcaatcattaaaaagtcaggaaacaacaggtgctggagaggatgtggagaaataagaacacttttacactgttagtgggactgtaaactagttcaaccattgtggaagacagtgtggcgattcctcagggatctagaactagaaacaccatttgacccagccatcccattactgggtatatacccaaggattataaatcatgctgctataaagacacatgcacatatatgtttattgaggcactattcacaatagcaaagacttggaaccaacccaaatgtccaataatgatagactggattaagaaaatgtggcacatatacaccatggaatactatgcagccataaaaaaggatgagttcatgtcctttgcagggacatggatgaagctggacaccatctttctcagcaaactattgcaaggacaaaaaaccaaacaccgcatgttctcactcataggtgggaattgaacaatgagaacacttggacacagagtggggaacatcacacaccgggacctgtcatggggtgggtggaggggggagggatagcattaggatatatacctaatgtaaatgacgagttaatgggtgcagcacaccaacatggtgcatgtatacatatgtaacaaacctgcacattgtgcacatgtaccctagaacttaaagcataataataaaaaaaagaaaatatcttaacaggaataatccaaaagttttaatggttttaataagttaatttagtcataaatgagagatcactcaactgttttatttcttaagcttggtaatacagtcatagattttcatcatggtattctttatatgtttttgtatgccttaaatgttgcacaataaaaacgttttaagtaatagaagaggaactcttcaagcagtgtacggtggtgtttttcttaaaggatgaattatcaaatgcttgctccccatggaagcctcttaaggaaaagttaaaactttgaatatgtcttatgggaagagactgacgtagcacaaatcattaaaaaaccttcacctaattgtcttcctggtcattttcatatggaccaaatgttcactctagggcccaaaaaacatttgtttcctgcatgtattcaatcttctggaacttgatatttcccacgaggtttggtaacagtgtcccaaagtcaaggtgacaaaagaactttgcattaataaagacaatttcgagctgtagtcaaatttggagggaataaactaccccttttccttatactgaaagtcttttaatatgcctgtgccttagttgaataaaatctcctacgtgggggggagaaaacaatgctctgcagtgtcatttgcatacaagactgccaaaatttttcagtcaaaatattcgtttaaaactttaaaaagaaatctattccatttccatcactttgggtatggactgggtataagaaggttaaggtcaaatacaggatttctgaggtcaatggcaaggatagccagagatctgaaaaacagtgatatatgaagaactaaagaaactggatgaggagtctcaaaaggagaaggcttggggtgaagatgggatgggcataacttcttcagagttagtactggacctggtcagagtagctaatcagtatatgattgttgaatgaatgaataaaccaattaatgaactaaacaaactcacaatagaaaagcagtagtacagaagtaggagaagagagtaattgatagcagaaatcaaggtttacttatttttgtactcctggtacttgataccatgcctagtgcatagttggtgcccaattaatacatgattggattatagcataatcactgatcactacatttaaagcagtccaatagtggaacaggctgcctcacaaatagtgagctctcgtttcctctacacagattctactatgggccaggatctcagccaagcagtggagccagaggctggacagacacaagcagagattttggaaaaagactgagtccctctcagcacttcaaagatcccttccaacacccaaacatcaaaagccatgttatattgccaagcaagggtgcctatgaacgcctgttgaaaccccacaacaattttttcagccatttattaaaaccccaaagagactatcaggacttcagggcaaacatcctagagatagcaatgcccccagcaagaagaaaagagttctcagtctgagaggcacaaactgtaatcagtgtaattaacagcttaccctcacctctagccaggcgtttcttcaagattctagtgtttccagtccttacagaacattctcaagtcagcaggctacactgtcttagtgtccttgtacaaactgatggtaaaacagatagcaccccaaaatatttccacatgcacaaacaaccttgaaacgtgtgttcgcatatcttacaagcaggtatttttccaatgccactcacagcctattagtgggtcattaaattaactcagtgactcccaaccaacatatatttcccataaatagaatgaaatggaaaaggtggactagaatagaaaatatcagagtgcctgacatatgtaggtatatcttgtttcatgaaaagtttgttttagaaatataaatgttgttatagatacatgtgaacatgtaaaatggatttcttattgtaggttaaagtccaaaaagtttaaaagcttcttgtagaaaagatcaggaagacaacatcagtagttaagagcaaaggccgggcatggtggctcatgcctataatcccagtactttgggaggccgaggcaggcagatcacaaggtcaagagattgagaccatcctggccaacacggtgaaacctcctctctactaaaaacacaaaaattagctgggcgtggtggtgcatgcctgtagtcccagctactcaggaggctaaggcaggggaatcacttgaacccaggaggcagagattgcagtgagctgagatcatgccactgcactccagcccggtgacagagtaagattccatctcaaaaaaaaaaaaagccagggctttggagttaggcctaacaaagtctgaatcctaattctgctactgatatactcagtgatcttggcatgccacttattcctctgagcctgtttcctcacctgtggaatgtgaatgctatacaatatagcacctgatgtccagtaaacaataatgagtctcctatgaagtcttctctgagtctcctatgaagaacagccaatgctgtgggtacctggggtctcagggttgctctgggcctgatcatccactcagatctgtaaggaggatttgcaggatccatttagaaagatcctcccttacttccacaagcatggcctttggctcttaaatacctgtgctggggttttgtaattatagaaacaacaggaaccaaaactcattaatgttgagctacaaaccagagggaagcttctttctcaaaacagggctcaggcctagaaaaatctagttttctgaaatcgctagccagcaacagcactgagatggccatcccagaaacaaggccaacacagaagcacccataaaggctgctggaggttgggacaaagagatccttgctgtccttacagaccccctgacttccaaggagctcccctctcacccagcctggcctgccttctccacagggtagctgatcgtcagcatcatcttcaatggtgttgtcaagagcactcagtgctcctgccatccctgtccatctccacatgaaaggagaggttagcactccagcctgggcgactgagcaagactccatctcaaaaaaaaaaaaaaaaaaaatagaaaggagaggttaggaaggagatgaagcctgaaagcactgggaggacaccccagcataggggaacacagagacacgtgaagccagggagaaaaccagtagtacagataagaaatggaagaaagcaatgacaggaagagagacaaagaaacacagaaagaaataaacaaaaatgcaacaaagaaggtttttaaaagcaaatcaaaaaataagagtataacaaaaaggaggagagcagcgaagaaaagaagtaatggaagacgctatgaggacaagagaccatccctagattccaagctgcttggttcactgttccttcagagggggcaaggcctaggcacagcgaggaagaaggcatgcagggaggggaggtgccatctccacccccattgtccttcccctcctcaggtctggtccatcagggaaacctaggacacaggctcaggggcatttgtagaaagaagttccagaagctgtcagatttcaatacatccatcctgccctccactgccaggtgccacctcaggtgttcccaggcctgctcctctcccccagagatgtggcttcagctgccaagcaattcctatcagtcttgtcattctcagttgccctttccctaagctctgtgtgtttccctctgtatttgacacatttgggggcaccccaatctttttcttgaggcctctggggctaaactacactttttgcatttctgagaactcagagaataaacagcagaggcctaaaaccatggactggtcttgaatcctggaaatatcttggttatttgcaaaaggaacctcaccatgcctctctcttctcttgctgtccccttctgtggagggggcgggtggctatgagaggacttggcctggcactctctccctctgtggaccattcctgtctcctcaccttccaaatcacatggaagaggcacagtaagtactcacagaagatgacccagtagaatcccaagtcattagtgaggggcttgggcctggaccaagggggaagcctgatcccaagtccctcccccttctcaccccaatgggagaaggcttgaacctaagtccacatcctttcagttaaaatgagcaggagccaaacttgtcattgtttcctaacatgtgctcctacagcaaaaaggcaggggtggctctagaaggcgaaaaagcaaagagggcacttcgcagtgcggtggtgaaacccagagtcagaaagtctccagaggatgaggctcctggcatccccagctctgtggggaggaggaaagggtcttaatgggcagtcattctgagcagaaaccccagtgtcgggcccaggaagagcgggatgaaagggggagggaagcccgctggtagccaggcggagccagaaaaataggaggtgcagagcgaaggcctctgctaggccgctggcctgccacctgggcccagagcgacttcttgctgtgccacacccactagctgccatgttcattcctcaaaacctgagatttcccctcaaaacacagatgggggatgcgggaatcagtctggccagccagtctggctccggtgttcatggccagggcagcctaagtcactcatggcttcttagctgccctgaaggctgaaatacagagcatctttgaggacatctgctctatctgtgggaaggaggacaaaatgctcaaactataataaaagcaagggccaggacccaaaggggtctcactccctgtttctctggactctctgtggggtgcctgtgtgcaggatttctgcagaagatagtccattttgttaagcctttgaatattcaaattgaaagtatcgcgcaatcattgattgtcaaatcatgggtttctagaggttttaaatacttggcatgagggggaaaaaactcaaacctatacccgaaggtataaaacattaattctgtttgtctcctgttccagggacctgggtgcagccggatgctttgtgaaattttaaaaatgttgcatctctgcttctctccctgccccaggagccctcccaggcgctgagtccctgctgctgcagcatccagccaccgacccagctcctgctgaccacgatgtcgggtaactcggctgcttctcctagggtcgggtcaggcgggccaggggcatttcaatccgggtgtgtttccacggcttttcctgcatagaacagagaggcacaaagtcaaggcatgcgagtaagggccggggatccggagaggacgcgagccacgctgtggccgctcccactcagcgcctgtcccggagggcagaggcccagaggccgagttggccgctccggacgtccgcgtaccccaggcccccgcccgccctcccacgtatccactgttgtgtcctgagacacgcggtgcggaccctgcgcgcccagaagctgctacggggggagctagaggctcacagtgagcctgggacgggggcagagcgcaccgactgcactgagccgagctgtggcggtccctgcgcggaccccgaggggcgcccgctgcccgcggagtccggagccgatcggggaacggggtggtggggctgcggtaggctggagcgcggagagggcgcggcgcctgggccctgcgggcggggcacgggattccctgggtccgggctaggaagagcgcaatctcctttcctggggagaccctaactcctggaacccggcttgagggggatccctgctgtccagctgcggtccccgcagtgaccaggcgaggcgctggcatcctggcactatctccaggcgtccaggctgaacgcgcggtcaccctcggccgccgcacccagcgcacttcccggcgcgattcctggacgcacactgcagggtagtggtcagggccggagccgccccggactcctgcggccacctccaccttgaaagctcgcccggctcggcttggcctaacagccagtccccaacctactcactgcggcttttcggggcccggggctgaggctgcccctgctcccagcgctcaggggtccctcccagcgaacccctcttgagcgcgcccgccacctcccgcgagccggggcagtccgaccgggccccgccagccccggggcggcccctaccgaagggcggcctcccggcggagtgcagggtcatcgggagccccggacggctttccccagctcgcgctgcgcggactcgccccggagcctcagtgcgcctcggagaaacgcctgccccagaaagggagggggtagggagagaggggaagaaggggagagtaggagcgggggcgaaggagggaggagggcaagatggagcgcggaaaaggcggagaaaagggacgagggagagcgggcagaaggcaaagacagaagggagcgagggagggagttcctcgggcctggcccctttactaggtcagtctggcaggtacctcgccggcccaggacggggctggccaaacctcaccgcttgctcccgggctggcttccagaccaagggcacgcagaggtcggagcctgcccagaagccacacctggccaggcggagaaggaagggactcgggacttccatgctagtgggaacatcacagtggggtgggctacgtcagccgccataatcagagaaagccccctgccccaggcctggcccctccccaggtccataataccctctctctcggctgtctgggtctgaaagccaaggttcccccgacctaatcagagtggtgggctccgctgcactggtctccatattccagagcagaaaaacccgtttgctattggcctaggactgaggcccagccaggggtggatggccccacaaatttccacggattcttttcctactggggctctgaaacctgctcagctactcttcattctttcaagtttgaaatgtttgggtttttaccatcctttgacattttttgtgtgtgttctccgaacttagaaacttggctttgggtgccatagcctataaaaggggcccccactctgcaccctggcacccagaccttggactcgaccactgactcagttgcctttctccagaaaaaccgaaggtgtatcaaggtgtccgagtgaagatcacagtgaaggagctgctgcagcaaagacgggcacaccaggcggcctccgggggaaccgtaagcataagcccttccctcattccccagcccatgccaggcctctttcaaagctgtgtctgcaaggtgtggaggccactcaaggccccacgcactcaccattcccagacctggccttcctctgctgttcctatgacttctgtacccagctgcatcccaatcgggaagctacagaggacagctggggcatgttgtggggctcaggatttgggggagcccatccatcccccatgggtgaaagtaaagtataaaaagtgcgttggtcctctgcagggggaggagcggccagcaggtaagtatacatcgttttgttaggaagacagtggatatatgtacagcccttgcagacccatagaaaatctctcccagaaattcacctcattttaggggccccttccaggatagcatctgtgtggaacatcctcccttccctcctcattcttctggaactcaccctctgagatcatttatctgtaaatcatcagttacctaaagtatctagcagaaaagggccctgtctctgcagaagagacagctggagtacaggaccacttccctaaaatgtatcaacaccttaagcagtttcaggttattacaaaattgaactgagcagtcataagggtataccctgacactttatacaccttcctacggtaagtactgccaaaggcactcagggcagcaacagaaccaaataaactaggtggggttattgcccaagagagggcagctcatccctaaaaagcctcaatcatacaattgcttgggggttggtttgggtgtgaacataggatctgacagctggggctcatattgcctctgttaggattggtccttctccagcccattggcatctgccccacaacagtttttgtgcctgatgctgttcatgtgcaatgtgtgacttcatgaaataggcctttgacagcgggacttcttgaaatgggagggggcaaatgatgtaggggaggtaaacacaggttccagaaccagatggactgggctcagatctcagttcctccatggtgtgtatcctcaagcaaattacccaattcctcttgcctctgtttattcgtcttcaaattggggatgataggattttgtgagggttaatcgagttattgcatacaaagccgttagaagaatgctttccacatagtgagtgctcaataaatgttagttgtcattatttgagaaataataatattatctggggaaagcaactaatattccaaccaaggattgaaagccagctatttggtaatgtttgttcacaccctttgctcagagtttagagttcagatgcgagccagctgcaatttggcatatacagcacatgcagctggaaaagtaaggacctccatgtgcagaatttcaggtaacgcattaacactcccttacatttctagaggacttcacagtggttcttcttttaaagcacttttgcacagccactatttcatttagtttttataacaaccagcggaggtaagtagatcagagatctgtacctcgattacaggcaaaattcaaaaccttgaagttgctcatggcaacgctaaaagtaggactaaggtctttttcttagtgtaatataaaaacccttctgttggctctttatgctctaaattcatcattctgcagatctgacgatactaagcaggagtctgatagcctcaaccccttcagttcagagatggttatataattaacaaaaccaggtacaagggaactggaaaatgcttctggagaaaaacatcatcaagactttcataataaaatgtaacgtttccttaaggagctttggtacttgctacagttctgctcagctgcacctggagagccccatgtgagtgtggcacttctgttgctgctgggcccttacagatgggtgtggccactgttcccttcttagctcgctacaggagctaatgtgagggtaacacacttcacttgtgtatctgaccagtttctgttccccggagtagtttgacttatttaaatttttctgaattccctcctgagaaataaagcaggacttctgaaccagtgtcttataggaacaggcagagtaaagcctgctctactttgcttcccttaagactgcatcagcctatgccctcgcaagcaagcaggtttaacacgcatataatttaattacaaaagccagacgtaaaatccctcactggaagccatcggatggatctgggattctaaagaagctgtgagagcgtacttagtaggcaagggtagcagacaccaggggatgatgttgcctgcttcttagtgtagacctttctggtataacagagatgatccccagtttgttcatttgttgaaggatgcctctgggaaactttaagccaaggagagggttaattatatcaaatactacaaagtggcaagaaatctatcttaatttgttataaagtcagtgtagtatccacaatttaaaattttaagaaggcaatcacgaatggaagttataggttgagacagacattcagtaaagaattcaaatattcttcaagcagtgccggaagaaactgtgtgtatgccggattggaacactcgattttaaaaaacttatttcagccagatcaatttgcaaacatgcgcatgcacgcacacacacagacacacacacacttgcctttggggtaaaaggaaacttgagttagtcgttatcaaaagatatcatttacctttctttttttaaatcattaattttttaaacagccttgatgtgtttttataaattgtagactgtgaatttttgtgctgtttgaaatctaagagagagttgcctttctttgtattcttggagcaaagtagaaagtgaacccatgactagaaagataatatcaagtaggatattgtaaacacacctcagggagataacatggggtggaggcagacaaacaggccaatccgggggaggaatggagttaaggaaagctctacaatgaggcagattttttaatacccactccttccaagtccttcagctcaagctgcagccaaatatttgcataaagagctggtaaaggattccagcttcctggttcatgacattacagcatggatcgttttcaaaattaatactgcctcctgtttcagcagtggctgcctgcacagctctccctgtggctcagagtatgggagtgagtatgccctgtaacccaaaagaggtgtggtgagctcggcttcccagcacagaatcacagagcaatacgggtacctttaaactttaaagccacacctgaaatttaaaaaaaaaaaaaaaatcctaaattactcagtataattattaattcaactgaaaaatgcaggctgctttactttgaatagttaaaaagagcagtctcataaacttttaagtatttaaatacagtagtttaaataaaagcaacttttatagatagtagtacaaaacatacaaagtactggaataattcccgaccattaactagaatgaaagtaggttccaactcaccaaccacagctttaagaaaatattttctattttaatatttcatgtatactaagaacatgtgaatatttttagctactcagaattaacaaaattaagaattgtgttctttggggaaacgactccctaaggctaagtagccagatggtatatgaaatttttgagaaaaataattgactaagccatagatagttgagattaaataaatgttagtccttaataattttaaatcgaatagtttaataggaagccttttgctgcattttctcaaactgttacatttttaccacataaaattatttacattaattttttactaaaaattaatcacttttaaaatttaagtagaagaatctgatattaggaaaaaaactccccaagcaagcaaacataaatattggatctagataaaacataatattggttgtatttaagaagtctgttttatgattcgatttcaggttttcattgttccaatgcaattttccagattgaatcttaaaaggattataaacgtcaaaaggcattttaaattctacacggacttaatacacctaccgcaattctatgcacctgtctttcaaattctataaaatatttgttgacactttccctttcacttgttttttacaatatattttgtacaaaaatttgtcaaacattgaaaaaaaaaaagaaagcaactttttctgagaaggaagaatctggcttaccttatagcagaaagaaacatagtcctcatcaaaatgtcttagctttcccttcagagcatttctttcagcctgcttcacggtgatattcttgctttgacagcggtccggaggcagcagtgtccacctttcagacccagttgcaccatcttctgcaggtcagtacagccagcattaacagttccctcaaacactctttcaaaagtccatctcaaaagtctttcagtcttgattcaggggttaagataggcaccaccatttaattggaatccaaccaatcagaaggtgaaaaaggcatagtcactccacatgcaagcccagcaagaaaacaagcataaatgttgtcttcatttctgaattctctactctctgctatattgtctcaagagtttgttcttcacatttattccagttcctcatcgccaagtaactaaactgaactacaaaatcagaattgttctcaggaacttatctttttttagtgcactgttagatggaatacagaacatcccaagacactcaaataatgcctttgctctgttcctttagtttccagccgacaggggcttccctccccttctctgttcccagaaagcagttcaaacaagtgtaggttttctcagcccaataagaataactcgattacataaacactcctacctctgctactcaacagctaagagtttaaggaggtcgtatataaggaaacctctgcctatggcctctccccactaaatgtgtcaccgtagcttcaccttaaaggaacttgagacctcaagaagaacacagtgtcctttagtccctttgatgagcacactctaatcctctcttcttccagcatttacagataattatcacaaattgggcctattaataataaaatggaaaaggagtaatgtttactgattatctttgtttgatgtttaacaacttactttgatcacatcatgatgttaacatgttcactgagaaaacatttttgctttttgtacttccgagccaatagtgttaattggtactctatgttcctggtttccatgattatcatttgcattctcatttaaatcacttctcaaaattctctcctccaaacttaagttactgagtaagagtgaaaagttcaaaaaagcaatcaccataagtcaaaagaattatttcccgtagcatcagaagttttctcaaagcctcaacaactttgtcagttacttctgagaggtttacgtgaactgccggtaggggctggatgtccatggttttacagcccaagaaaggggaagtttgagccattatttgactgtgacacttggacacaaattgggtcaccatccttttatttttgccctaaccagttttacagccagtttccacattattaaccatgttcatttccctggagcttgaattagctaggacaactaaagagtcaaaattgcattcccgtttacttttctggatttgttaagccccctttccccctagacatagtaaatattcagagtatagatctccattcaaatctgtgttttgcaatttttatgcaaaaacctgcctttttcctttctcctctaggactgtattttgagcctgaaccaatttcttccacgcccaattatttgcaacggggagaattttccagttgtgtttcatgtgaagaaaactcaagctgcctcgaccagatctttgattcctaccttcagacagagatgcacccggagcctttgctcaattccacacaaagtgctccacaccatttcccagacagcttccaggccacccctttctgctttaaccagagcctggtaatttttctcagttctttatatacctgattgtgtctaactatggggtaatagtgctttgtgagtttgcaccatcccgtgggaaatcatacaaaaactatcagcaaggaaatcatccaaggaaacaagcagagaagaatttaaaagtcaatgtatagaagtagccacacactgcagggcataaacctttggatacacacgtaatttagatttcccaagatttagatttttcggccaccaagtaagttggtgggtagcaataaaaagaggttcctggcaatattcatttaatgttttttaaactgtaaagtcaagagacctactaattggaagtcagtggtttaaacaatggctcttggattttttgatggaattttgagttcttggaaatggaattaaggctgtgtatatatggtaacaaacttcatttcattagggggaggttttgctttgttttgtcattgaactggctctactaactgatagtttgagtctgctataagcacaataactcatttgggtctgagatggttagtaaaaatgaagccgtaatctttgaaaaaaattaaattggttgttctcggtggatctcaaatgtttgaaaatgtgttatccttcaaaatgaagtaaggtttctattagtggaaactagttatttcagttgtcttttagagactcacaggtttgttttgtaaaccttaaattgtaaagttttcttttttaaggaatgtaaatactttttgcctttggattgtcaaaagtctgtgtgggcatcagactaaattttagagcggatgggaaattaactctgcagaatatgcacattgtcacggggaaaatatggggccccagtgacccagttccttcccagcctccaagttaggttttctcagtaacaattgtagacttgcttaagagaaaacagacagtagctctcactccagggaacaagactttagtggcgagacaggtagtgacacatcttggcatatgccagggatactccaagatccttgaagatccaagttatgcctttgcatgatcacctgattcttcatggtgagggtgtggagaaacatccagggtgccacctacagcttagattgtggcatacagcaggatttgatatgcaggtgacttgaagcacaatgggattttgtggtttcagaacgagcaccctctaaagtaggattataacaaaggaagccagtgaagcaaggcaatttattgtttggaaagaaataggtaactatagattgtggtgtcatgaaatcatgtagtcagcaaataaaattacttctgcagacttgggttgggtgttgtttcgtttgatttggttttttacccctcattttctcactctgcattggtaaacccacactgttcagttctttgatcctgtctaagttattaagctctttgtttcttggttgtcatttctctagatcccaggatcaccttcaaattcctccattctctctggctccttagactacagttactcgccagtgcagctgccttcatatgctccagagaattacaattcccctgcttctctggacaccagaacctgtggctaccccccagaagaccattcctaccaacacttgtcctcacacgcccagtacagctgcttctcctcggccaccacctccatctgctactgcgcatcgtgtgaggcagaggacttggatgctctccaggcagcagagtacttctacccgagcacagactgtgtggactttgccccctcagcagccgccaccagtgatttctataagagggaaacaaactgtgacatctgctatagttaatagaaattacagtaattcagaacatggcatgggtatatctatttttctaccacgtctagatgacactgcaaaatatgcaacttggtaacacaatatcccaagcacagtttacatgtcactatttccaattttctgatgctaagcattcatatgaagtcctcagacccggtcacagcgccactcctactttgtatgctcatagtttaaatttttgtaggaaactttcaattgttttactttttgtataacgaacaaatgctgtctccttttttactaataaataattttgtattactaactgttggattttttttaatttccagtagtcatttttaattgatttgaacattatccattaattctggaaattgctaattactctcaagtggtttaatcttatggattcatgaatttaaaattatttttatttgggccaggcgaagtggctcacacctgtaatcccaacactttgagaggctaaagcgggagggtcacctgagatgaggagtttgagaccagcctagcaacatggagaaatcgtgtctctactaaaaatacaaaaaaaaaaaaaaaaaaaaaaaaaaaaatagccaggtgtggtggtgcattcccgtaatcccagctactcaggaggctgaaacaggagaatcacttgaacccaggaggcggaggttgcagtgagccgagatcgcaccacttcactccagactgggcgacaaagcaagactccatatatatatatatatattcatttaaaatgcagtgagacaccttggcttccatgggatggagggtaggcacagctaggatgttggaaaagggaaaccctgcctcacctccagatgagggggtacatcttagagcaacatcacgaaaatgcatttatgaaccattagtttctcttatctaacattagtcaatgaagtgttaggacgaccaaaaagctcatgttgcctgcagctatgttagcctgtagatcattctttttcctttccaaagcattgctttggaaactttctgagcaaatagttgatcttttccttgagagctgccatacagttaatgcagcccaaagtttagaagtcattattttctatttctgaatttttggctttaggttcttaaatatacatcacttttgtttacacgttgatttatagtattgactatgttgtttacacttgaattttagagtttgcttcctctgattaatctatttgaagaagcccagctgtctttcaaggtaaagaggagttatttaatctacctatgtgggactagactgttgaatcttgtttgctgaaggcattaaggcacaggacttaatctctgaagtgaagtctgaagagcctttgccacatctcaagtgccagtacaatggcagcaatactggtaccttcagcattggccacaggtaccattttctgagcacgtcctatgtgccagaattatgtaagagtattctcactcgttatctgatttaatcttcacaatactgacagcaaaatgaggagtctgaggctctgggaagttagttcacctgtccagtgtcacccagcctgtaggcacccaagcttgggtcagaaagatagcaaagccctgttccttcctctccagggctgggaagtttgagccaccattcgtgaaagaccattcaggaacccatggcatcattaaatgccaacttcctcatatacacaaaggtgtgtcccaaaaacaattcagtcagacctcgccaaaagggccggattgtccataggacacagagatgccaggcacaagagctaccagattataggtcctatactctggggactcaggaagaaactgactcaccaccacttcagtgtgtttcttcctaccaggaaacaaatatgctttggaaatgtcaccatctgaccaccctccctggggactcaactaaggcttgggcaaatagaacaagttgcagcctgccccatgggataatcgtgccagggaaacagaacaattgctgcctttctgagatgccagtaaaactagatttttaatggcttgaaactagcctcttgtcagcaagtatctattcacacagaccaaagacccttcatactgttcacccaccacctcacccccagcaagtgttcccaagatatagagagcagagaatccaaagctgtctagtggttggcaccaatataccccttttctagatgccattctttttttattccccatgtcagtcctgtggcacctgaatcaattctcttgcagcttaaacagagagcatttttctacctccttaggacttactctttcctcgcacgctcctagtttttccctaaatctagtgcagaaaaggattcatagaggaatgtgagacaagggtgagcacagctcctgtgcatcacgatgtgtaactccaccttaaaaccgtcattaagaacttgctagaaatttgggccaatgggtaacctggtgcattcctaagtgggtggacactgcccactcagtctctcaggtgctgcagctcacacagaacacctcaggagccctgtagcctcaggcagcacatccatcagcagcacgtctcatcaatatatactgtggcatctggtaaaacccgggtgcttacacctctgtgtgagaaagagcaattcaataaatccagggtggggcccaggcatctgcatgttctaaatgtacctaagttgatactttctgttttttgtttatcgtgtgtaaatgtatgtgtgtgtgcgtgtgtgtgtgtgtgtgtgtgtatgatggagtctcactcagtcacccaggctggagtgcagtggcccagtctcagctcattgcaacctccacctcctgggttgaagcaattctcctgcctcagcctccccagtaactgggattacaggtgcatgccaccacgcctggctaatgtttgtatttttagtagaggcggggtttcaccatgttggccaggctggtctcgaactcccgacctcagatgatccacctgcctcggcctcccaaagtgctgggattacaggcatgagccaccacgcccggcctaaatatacctaagttgattctgatagagatgatcttctgtttacacttgaaaaacactgacatagtcaatgtccagattgtttacttgaagaaccagcagcacaataataatagctttacatggattaagctttttctatggtccggtgctgtgcagattatctcacttaatcctcaaaaaaaaatcacacaaaatatgtgttattgtcgtcctcatttttatagatgatgaagctgaagtttggagagatatgataacttgctcaatatcacagcactgatataccaggaaaagagttctctaacacaggtgatccgatgttactgcctgaatttccaatggcctcagtatactttccatgcattatacacggaagaataatcttctctggaattttatcttttgccttaaatgtcacaggtatatctacaaccagttcctcataccacaaatgcatttgataacattataaatggaagtttacatgaaggaatatattttgttattcagaaccattatggaaatcaataatccacaaaatgtgaatttagtgcttgccatatgcaagactgattacatgttacatgccttcaaaatgcaaaggcaaaggttaaaaggggatgtgattttaaaaatttaaaattatgaggatttcaggcaggatgggcatggacagattttaaaattcttagaaaagtttagttaggagtcaactcttgaagctcgagagagaggagacaaagctgaaggtagtaaacatttggaaactattatctcaagaaatttccagagcatgacatcttggcagctggcctaaaccagcaggtgaacacttgggagcaaggtatagacagataaggataactgaaatgatggagtcagggaggggaggctacctatggataaaaaatgcttttaaaaatcactctttactctagaaagatgaagactgaaaagggttaggatcaaagctagtgaaattgtgaataattaggtgaaagtaaacatgaacttaccattctttccaaatcctcgcaacctacgtaactaaccccatagcaactcactggtgaggcttttctgagaagcccccctcatggctccctcctcctcctacaagtgacagtatggagatgccctgctaatagcattatttggtcaatggggtatctcagagccctgggggctagatttcggggtggccagagggtggccatccagggccaggtggctctgtgctttaaggcagagtaattgacctcattttttatgcttctataggcctctgggaaagatgtagaggctggaagatgaacaaacctgagacaacacagctttgcaggtaataaagcaccaaactcagtgaatacaggaacctgtgtccattaggtcatacttcagaaaagtttcttttgcttaatatggatagagaacatacagttgttatttgagaaatatggaagcatgtgtgtgtgtatgtgtgcgtgtgtgatctttttcattctttttcagacaaacaaatgctgagagaattcaccactaccaagccagcactacaagaactgccaaaaggagttctaaatcttgaaacaaatcctggaaacacaccaaaacagaacatctttaaagcataaatctcacaggacctataaaacaaaaatacaattaaaaaaatcaaggtatacaggcaacaaaatcacaataaatggaatggtacttcacatctcaatactaacattgaatgtaaatggcttaaatgctccacttaaaagatacagaatcacagaatggataagaattcaccaaccaactatctgctgccttcaagagactcacctaacacataagaactcacataaacttaaggaaaaggggcggaaaaaacattccatgcaaatggacaccaaaagtgagcagcagtagctattcttaaaacagacaaaacaaattttaaagcaacagtagttaaaaaaaaagaccaagagggacattatataacgaaaacagatcttgtccaacaggaaaatatcacaatcctaaatatatatacacctaatactggagctcccaaatgtataaaacaattactaatagacctaagaaatgagatagacagcaacacaataatagtggcacttcaatactccacttacagcactaggcaggtcattaagacagaaagtcaacaaggaaaaaatggatttaaactataccctgaaaaaatggacttaacagacatttacagaacattctacccaacaactgcataatatacattctattcaacagtgagtagaactttctccaagatagaccatatgataggccacaaaacaagcctcaataaatttttttcttttttaatttttttattatactttaagttctagggtacatgtgcacaacgtgcaggtttgttacatgtgtatacatgtgccatgttggtgtgctgcacccattaacttgtcatttacattaggtatatctcctaatgctatccttcccccctccccccaccccacaacaggccctggtgtgtgatgttccccttcctgtgtccaagtgttctcattgttcaattcccacctataagtgagaacatgcggtgtttggttttttgtccttgcgatagtttgctgagaataatggttttcagcttcatccatgtccctacaaaggacatgaactcatccttttttatggctgcatagtattccatggtgtatatgtgccacattttcttaatccagtccatcattgttggacatttgggttggttccaagtccttgctattgtgagtagtgccgcaataaatttaagaaagtttaaattatatcaaggattctctcagaccacagtggaataaaactggaaagcaacttcaaaaagaaccttcaaaaccatgcaaatgcatggaaattaaacaacctgatcctgaatgattattaggtcaaaaatgaaatcgagatggaaatttaaaaattctttgaactaaacaacaatagtgacaaaacctatcaaaacctctgggatacagcaaaggcagtgctaagaggaaagttcataaccctaaacacctaaatcaaaaagtctgagagagcacaaaaaatctaaggtcacacctcaaggaactagagaaacaagaacaaatcaaacccaaacccagcagaagaaagaagataaccaagatcagagcagaactaaacgaaattgaaacaaaaaaaaatacaaaagataaatgaaacaaaaagctggttctttgaaaagacaaaattaatagatcattagcaagattaaccaagaaaagaagagagaaaatccaaataagttcaattagaaacgaagcaggaaatattacaaccgacaccacagaaatacaaaacatcattcaaggctactatgaacaccttcatgcacataaactagaaaacctagaggagatggataaattcctggaaatatacaaccttcctagcttaaatcaggaagaataagataccttgagcagaccaatagcaagcagcgagactgaaacggaaatttaaaaattaccaacaaaaaaatgtccaggaccagaaggattcacagcagaattctaccagacattcaaagaagaattgggagcaatcctattgacactattccacaagatagagaaagagggaaccttccctaaatcattctgtgaaaccagtattgccctaataccaaaaccagcaaaggacataaccataaaagaaaactacagaccaatatccctgatgaacacagatgctaaaatctttaactaaatactagctaaccgaatctaactacgtattgaaaagataatccaccatgatcaagtgggtttcataccagggatgcagggatggtttcaacatatgcaagtcaaaaaatgtgatacaccatataaacagaatcaaaaacaaaatcacacgattatctcaatagatgcagaaaaagcatttgacaaaatccaccattgttttatgactaaaactctcagcaaaatcggcatacaagggatatacctcaatgtaataaaagccatctatgacaaacccacagccaacataatactgcatggggaaaacttgaaagcattccctctgagaactggaacaagacaaggatgcccactctcatcactccttttcaacatagtgctggaagtcctggccagagcaatcagacaagagaaagaaataaatggcatccaaatcagtgaagaggaagtcaaactgttgccgtttgttggtgatatgattgtttacttagaaaaccctaaagactcctccagaaagctcctagaactgataaaagaattcagcaaagtttctgaatacaaaattaatgtatacaaatcagtagctcttctatacaccaacagcgaccaagctgagaaacaaatcaagaactcaataccttttacaatagctgcaaaaataaaataaaatacttaggaatatacctaaccaaggaggtgaaagacctctgcaaggaaaactacaaaactctatggaaataaatcatagatgacacaaacaaatggaaacatctcatgctcatggatgggtagaatcaatattgtgaaaatgatcatactgcaaaagcaatctacaaattcaatgcaattcccatgaaaataacatcaccattcttcacagacttagaaaaaacaaccccaaaattcctatggaaccaaaaaaagagcccacatagccaaagtaagactaagcaaaaagaacaaatctggaatcatcacattaactgatttcaaactatactatgaggccatagtcaccaaaacagcatggtactggtataaaaataggcacatagaccaatgaaacagaatagagaacccagaaataaacccaaatactgccaactgatcttcaacgaggcaaacaaaaacataaagtggagaaaggacatcctattcaacaaattgttctgggataattggcaagccacatgtaggtgactaaaactggttcctcatctctcaccttttacaaaagtcaactctagattgatcaaggacttaaatccaagacctgaaatgataaaaattccagaagataacattggaaagccccttctagacattggcttgagaatagacaattatcaaaagaagatatacaaatggccaacaaacataagaaaatatgctcaacatcactaatgatcagggaaatgcaaatcaaaaccacaatgtgataccaccttactcctgcaagaatggtcataatcaaaaaatcaaaaaaaatagatgttggcacggatgtggtgaacaaggaacacttacatgctgctgatgggaatgtaaactagtataaccactatggaaaacagtgtggagattccttaaagaactaaaagtagaactatcattttatccagcaatcccacctctgggtatctaccaagagaaaaagaactcattatacaaaaaagatacttgcatacaaaatgtttacagcagcacaaatctcaattgcaaaaatgtggaaccaacccaaatgcccatcaatcaacaagtggataaagaaactgtggtatatatatatatatatatatatatatatatatatatatatataccacatcatatatatatatgatgaaataatactcagccataaaaagtaatgaactaatggcattctcagcgacctggatgagattggaggctactattctaagtgaagtaactcaggaatggaaaaccaaacagagtatgttctcactcataagtgggagctaagctatgaggatgcaaagtcataagagtaacacaatggactttgaggactcggggaaaggatgggaagagggtgaggtataaaagactacaaattgggtgcagtgtatactgctcgggtgataggtacgccaaaatctcacaaatcacccctgaagaacttatacatgtaaccaaacaccacctgttccccaataacctatggaaacaaaaaaaaatttttaaaagaaaataaaagtttattttgcttaatatggatagagaacatacaattgttatttgagaaatatgaaacagagagagagagtgtgtgtttgtgtgtgtgtgtgtgtgtgttccactagttaccacctggataatcaggaagaaagaggagacatcggccccctaacctgtcacaattggacctggaatgctaaagcggacctggaatgctaaagcttacctgggacagtcctagtgaagccaccactttccctcctccattgtgtaattcttggttgattatctcagattttgagagtatttcctctgtgggttactgaagttctaggattatcctgatgaaagaaaaggggtgaatcctggaaagggatcaatttggggatagacatcactttccctaaagggggatggggtaaagaatttcactattgctgtacaaagaaaggagttctctgaaaggaggactcatcagaggacatggaactgaatgaggaattggagtgcatcctcaaatgggctccctgtgattctggtataccataaggctttcagtgaaagtatagagaataaagtgaagaaactgcaaagggcagcatggcctgcccagttcctccctctctgctgagaatcatgtggagctggtagcatcttattgcagggagttgcaatcaagggatcataggaagtgattgtcagccagtgaggggtgggtggctcatggagaaggtcagagtcatggcaaagggcatccgttgagaagatgcagctccaggacacaggtagaggacaacaacgcttgggagtgaaagaggctagagcttgggtcactcaaagaaggagtaactttaggacaaattcaagaaagtttttatacagcaggtaataaacttaacatcttacccctgcacactgaacatgtaaatagtttcaagaagggtttagataaatttaagtgataatattttagggctggaaagggatctggagatcacctacttcagtagttctcaaccatggctgcacattgcaatcacctgaggaggttttaaaaaacattgacgtccaagtcccagactaatgaatcacaacctttggggtggaacttgggcattaggattttttttaactttttattttaaaattgtaggaagttgcaaaaatcatacatacagtctcatgtacccttcacctaacttcccccagtggtgattatcatcttaaatataaataagacgatatcaaattcaggaagttgacattggtacaatgctattaactagactacagattattcgtctttcaccattttttacatgcatgcatttatgtgttgtaagggtatgtgtctctatgcaataaaaattagtatttttcacaaactctccagaagatcctaattcacagtaaaggttgagaactagggatctagtccagccaatcctcagttcacaggtgaggaaactgagtccagaatggcaaagtgacctgcccaagcacacaatcatcttttggagggaaggcagtggactttcttagtccagtgttctttgctatgcattaagttacctctgctcctttatgggttacaggtcactaatgtgctacttaagaagagctgatttcttgggggcagggtcaggaggtagaagggcagtgtgccaattttttaggttgccttaattaaaagacaaacacaaaaacacaacttttggtagttcttctaacgttataaggttattgaatgacatttctaaaataaattcataaaaaacatgggccctggtcaatagtaagcaccctccttcccaactcccacaacaatattcattagtattattagagaattctggcctagagggatcacgggttgggcatcctgtcgaaattattttattctttggctttctcccactgtggctccttttatttgctccacgttgcaaagggacttctagcagctgaggtcagcctcctgatcgtcactccacagaatgaggagccacggtcaagcttgttaatatgacctcctgccatgctggtcctgggaatattcctccctctccactggcagcatgcagccaggcaagtgcgagaactgacttactctctgtgggacttaatgtcttcatctgatatgctttcctggcctgaacaagacacagaaatgtttcttccttctacaacagccctctgttgaaagcagcacatccagggaagtatgtcaaaggactcaatggctccagcccaagctcttctcagcctaaatacttcacctgtctctagaaatccttctgtcagaggtgtttgaaccagagcaactccatcttgaataggagctaggtaaaataaggctgagacctactgggctgcattcccagccggtcaggcattctaagtcacaggatgagataggaggtcagcacaagatacaggtcataaagaccttgctgataaaacagcttgcagtaaagaagccagccaactaacatggtgaaaccccatgtctactaaaaacacacacacaaaaaaaaaattttgccggacgtggtggcaggcacttgtggtcccatctacttgggaggctgaggcaggagaatgccgtgaacccgtgagccgagatcccgccactgcactccagcctgggcaagagagcgaagactccatctccaagaaaaaaaaaaaggaaagaaaccggccaaaatccactaaaaccaagagaatgacctctggtcatcctcactgctacactcccaccagtgccatgacagtttacaaatgccatgacaacgtcaggaagttaccctatatggtctaaaaaggggaggcatgaataatccaccccttgtttagcatatcatcaagaaataaccatataaatgggcaaccaatagccctcggggctgctctgtctatggagtagccattcttttattcgaatactttactctcctaacaaacttgctttcattttactctacagactcaccctgaattctttcttgcacttgctctaagaaccctctcttggggtctggatccggaccgctttctgctaacacttctacataccacgtttatttgagacagaaaaatacagcaaggacatccatctaaactttgtctggagtctgggcccaggggagctgcagtacatggagggtctctggaagtgggtatggcagattagcgcctaagctcaactggctttcctcctctgcctctgttcctgggacttgctcacggctcacaaggtagcttcccactgtcagtccatcagcaacagccagttagagtcgattgggtgtgagaagcgagactattcataagcagcctgtcccctgtgccactggcttattaagcagagctaggcatagacagctgggaactctgggcagctcctttaaatttctctttgaagaatgttaagtattcaccagcagtgaaggttacaaaggctgaagttttctctccacccccagcatttcccaggggagtaaaaggaaggatcaaagctacaatgggcttggctgcccttctccaggaatggccagaggacaacttctgcttggtgagcagccatttatgccaccccggtgctggcaggtcacctctcctgggctggggagcaggagttcaatgattaactagaggaggccatctctggaggacagaaagagtcttctgatctggttagccatgcagacctgagcctggattttccttcccactccacttcaagagaggggtgggttcatttccacagttctccttcctgcagcaggaagggagagtagaaacccaacttcccagacaccaactccatttccacacaaagcagtagagcccagacctaagggttctggagccacacagacctggtttgagtcctggttccatcacttatctgttctgggacattgggcaagtgccttaaccttcccgggctacaacttagtggcggaaatcagtggagtaaaacctcattcagaaaattttttcaaaactgatgtcatcctgggaacaacttgcagaatgctatttttcttgcactgagcaaaaagaggttagttacactaggtgtcatcccggggaatcaggtctcatcacagggcccacaccatctgagaccttttcagatcctctaagatgctgagacaagaagccatctggtcttggagggaatggagatggtaagagcattgtcaatgacatggaagtctgagaagtgtcctattcatgcctttggaaaagacttctctgcctgtctggtttttatgctctccccacactttaggagaaaataatggttttgctgacttcatctggtcacctctgcaaatgcccccaacccctgttattttgtgtctgctgtgtaccagattctctgctagactgcctacatgcactatctcatttcatctccataaccaaaccaatggagtaggtattattatcccattttatacatgagaaaactaagattcagatagattgagtcaactgcccaaggcagtaagttagagcaccataattcaaacctaactccgtgtaattccacagcctattccatagcctgtgttttcttcccctaggaaagttcctggatacttctggaacagaattctcctggggtgagtggttcacacaactgacccacttcatccccactcagcaaaatgagagcgccgttgactgacaacaaaatgctgaactggaaacctccgcagtaaaacgtgatgcagaacagagaaagaactaagatgttctgcacagacggtatcatgccctctatgaggaaactactcgagcatatctgtgtttcaaatgatgtctttgaactatttatgttaaatgcccccccaaaaaaatggaaaggcttcttcgtagaggaaagagcttgaagttgctaggctgttctgccttcaacaggcatttattgtgcagctacaaaatgctgcaccaagcactgggcagtggaaaggtgattcagacacagttcctttgacaaaacctcaaaatcccatgtgaagttctcttttataaagtaaatcagaaaagattcaaaagttgaggtaccaaaaaaaaataatataaatgcaagtagtaaagcgctattgactgtaaatagaagcacttaataagtggttgttgtttctgttcttctctctaataagtgtatacaggtggctaaatgcttttgttgagctatgagtacctcattctgtggagtgactcagaaagtctctaggtgttagactggaaacaggtgatgttcagtgcacgcaatgcttgaagtgttcccaggtatttagtttcaggtaaattttactgtttaaaaaaattgtttttacttgctattaagtgtgttgaccttggataatttacttaacctctctatgccttgcttccttttctgcaaaatgagagtaagaaaagtgcttacctcattggctttttgtgaaattcaatgagttaacacgtgggagaaaagatgtttttaaataatcaattcttagcagttggtcattgttatgagttacatcatgcgtagttaaatattttttaaaaaattaaaatttattttcctataggaaaaaggagggactgaattgtgaatccattttctctgctttcagttatttctactcctgagaaaaaccctaagcacttagggtctagaaccacatcccgagacggtgagctcttcccacattttcacatgtgcctgaatcatttgtaggtctcgttcaagcagagaatctccgggattctcactcgggaggtctggggtcgggcctgagtccttgcatttctaacaaactcccagttgatgctggtgccactggttctgaattaagatgcttgtttacctagtgacagcaacaaaaattgtagcaatggtatccagaaataaacagcatacttttatagggctagtcaaatgaacccaaacatacaaaataaaggcaaacctcacaatcttcttgcaatgatttattactctgagagctcattttaggtgagattgtctccctccggagcctgattcctaaaagctttctatgactttgaaattatcgttttccttttggaggtagcacaatataagagctaagaagagaatgagaactggagtccctcccaggtttgcccctctaggtatgtaagctaaggtaaactacttagcctttcttaagcctcagttttctcattacaaatgggcatatacggaacattggcttgcctcctacagttgtttgaggactcaatgaaaatgtacgtgaagctggttgcggtgagctgagattgtgccactgcactccagccttgtgacacagcgagactccgtctcaaaaaaataaataaataaataaataaaaataaaagactggttgcggttgctcatgcctgtaattccagcactttgggaggctgaggtgggcggatcacaaggtcaagaaatcaagaccatcttggctaacatggtgaaaccacatctctactaaaactacaaaaattagctgggcatggtagcacatgcctgtagtcccagctactcgggagggctgaggcaggagaatcgcttgaaccagggaggcagagggtgcagtgagccgaaatcatgccactgcactccagccttgtgacagagtgagactccatctcaaaaaaaaaaaaaaaaaaaagaaaaagaaaaaagaaaatgtacgtgaagcagttatcctggtgccggtgcctggtacgtatcaagggcaccagaacattagctatttaaccttaaggtttcaaatccacccttctctggagacttcttgttccctactctcatgcatctctgcatcatggtcataacccatagcaacgaaaagccaaggtttcactctttgaaatctggataatggtatttgtctgcaataatatcctaggagtagagctagagaatttgttttgggttttgtttgtttttgttcatttttcagacacggtgagtcagaaacgtaaggctcagagatatttttagtttttccagccactaagaattcttgttgcctgcagggaaataaagaaatgcagagaagggggagtgctagacttgcctgcttgctatccaaaaccacttctttcctttgaaaaagggtctgtgcagccaaaacaagcagcgctaacgctgggctgagagtaggcaccagccatccaggaaagagacaaggcaaccatcagctacaaaagctgcttcaacagcagacagctcaaagaatcaaaaaatgcatcccaggagggctgggtgaggaaagacagtgatcttgccttggtatttgcagcaaagtcacagaccaggaaggtcaaatcctcgctgagaaccatgtggacaaatgtccaggacatggtcgctggcctcagggagcccacaattttattgaagaagcaagattgtcagaagtaaggaccaaaactcgtgtatacagagaaaggagaaagattgagaggaaagaagaggagaatcaaggaggcagagattaaaagaaggaagggatagaaaagaaaagaaaaagaaagagggaaggagagaaggggaaaagtacggactccgtttcgtgactacatcacaagcattgatgaaaagaagagaaatctgtgaaaacgagaaagcaggcactgtatgttgcatcctgacacacagtgagttgttacactttaaaagccacaaagaagagacgctcacccagagacagacttgatggatttggcagcttatcatactgggaagggcagaattgggttatgctatgttttcaatgggtcccctccaaaagtcagccaatgtgatagtattaagagatgaggcctttaagaggtgattaggccatgagagctccttcctcgggcttggaattaagtgtccttatacagaggtttggcacaaggagttggcccccacttgcccttccgtgttcagccatgaggacacagtgttccttctctctggaggatgcagcgtgagggcgccatcttggaagcacagagcagccatcaccagacaccaaacctgctggtgccttgatcttcccagcctccagaactgtgagaaatttctgttctttacaaattgcctagtctcgggaattctgttatagcagaacaaaaggactaagataagttaccttttcttaaaggaaaactttgataaatattctttgtcctctattcctttcacctataccccatgaagctgggaggataaggggagtaagaggaggagctgaaactaagaggtcagcagaccctaagccctagtcggaagcctccaaaactgtcaatcaaaccactgtgtctccagccctgggcctgactcaggaaaccatcacctgcctcttctccagcctcttctctccatccttgcttgtgaagtagtcatggaatactctccatactctttttcccccctttccttccctctttttcttttgttttttctcccttccttcctttatcctcctctgcctccttgattttcctcttcatctttcttctcaacctttctcctttctttttataccctagttttattccttacctctgacaatcttgcttctttgacaaaacattaaactgagatctcagactggcatgcaacctgattagtagaaacttgctcttcctggcctagtgcagttcatcatgcagcctctcttcctcttcccctggcacctcacagcagtcagcatccacgtgctcctgctaacaagtgcaaggccaaatgaagaaaacactaagaatgcattcacaaaagtgacagcatctcctctagccactttgaattttcccctcatttactgaggaaaataaaattcctatttgatctacaggtctgccacctctaaggagtcgttccattttctgaaacccagaattaaccagaactacaatccccactgtcacccaattttgtgttgtgttcagagatgttggctggtcagccaggtttttgagaataaagctgacttcaggttgaaatagtcaaaatcaaaaccttgggccctttggacaattccctagggactcttcataaagcccaataaaggtctccatagaaacaccttgcagcccatttatgagcttttttagcaatagctgtccagaaaacttttacacccccctgaaatagtcaatctaccccatctgctccatgacaacagaaaaatggtgcctcatatcactagccagcatctcgtaacacatcagggttttggcctgagattgttctctgagatacactatgcaaatatccagctggtatcaccagacaacaggaatttagttgggaaaggcacaaggattgggaagtctgaggacgggctcaaggtctccaactggacagccagctcaggactcctttgtcagggtccctggggacctggctgaggttttcaacaggtagggcttgatcctagtgcaacaccttgttcttaccctgggtctcttagatgagtgatcttggccaaatcacttaagtgatctcagattgtttgctcatcatgataataatcgtaatattgccaacctcacacggctgttgcgagtgcccagagaaagaaaaggtaaaggaatgtggccctcctcacatgagaaaggagactaacagaaattaaggagcttgcccaagttcacacaggaggcaagctgtggtttaaatctaagtgtatctgacacatattgtgttctgtttctactaagctctagatataagataaaaaatattatgcttatttgcatattgttatgcataatgtccaaatgtatgcttcatttgcacatatgattgctactgtctctcatctgggatgtagttcccagctgggtaatacatttgagctaaactctcctcaagcccagcttcagcccagcagagaatttttaggggcgaagtctcatcacaacacatagcccttctgagcaatcaggtgaagcatagagttccaaaaagcccaaacttcactcaaatttcctctcgtagctcaggatgggaagctggggctcttccaagggtaagcaagccaggtatcatggcagcttcacaccacatttttgtattcattcttgaccactccccaccatccccaaccctgctgcctgtgcccttttctaaagctcaagactctcaatattccagaaacagctaataccattaaaaatagtaattaattttgtggaacacctaccaaggtaagtcagcctctttatgatatttaatattcaacatgaaactaaaagtaggggttttttaaccattcccattttatggtcaaggaaatggaggcctggagagatgaggtggcccacccagggtcatacaactaagaaaggtagaacaggattcaaatctaggtcctcttacaccagacccagtgcctgtcccagggtgccgtcagtcccattgctgctggagggcagcatgagtagcacaccatcctgccagccgccctctagccagggcagactctcaaaatgcaaaacttgccagacaggcaggaatgcaaatgcacacacagcctgaagtagatctgccctgacagaagtcacccaggtggccacttggccatggaatgtgcccagcttgataagaaggcaaatgcctggcgtcttgcagggccagggtgcatatcaggtttcatttctgggctgtggcaagacagaagccgtatgtggtctttgcctgccaggactggctggccctgatgcccacggcctgccaggcatgacaagcccagcagtcttccctaacggggccttctcttgccccaagcaacagtcctaatgtcttccaagttgggcacagttccacagccccataaagctgcaagccaaggaatgcagctcccttttacttctgcctttctgaactctacccttctttcaaggtcagctcaagcctgccccccacattacaggttaggttcaaatgccaattctagctgtatggccttggatgactcatttaacatctcttagcgcccttttgtgaataaaatgggcgtaaaaatgtccactccccagggctatggtaaggattgagaggcccagtgaaacttcgcacatagtatatgcacagtaaatggtaggcagcccccacttctcatagtgacctctcttccctgcatttcagtttctcttatcacccgcctaattcaacttagcattttattaaacactgactcacatctgtttagctcatcattttccattcatgtgtaagtctcgtctttctctgatcttcttagaaccaagaaccaggctgttctttctctcatttcgccatggaccactaagcacagtttggaatcgtcacatgacttatcagttgctgctggtgggttggagctcctaagtatattgataatacagattgaatatccttaatccaaaaatccaaaatccaaagttctccaaaatctgaaacgtttttaagcaccaacatgataatcaaagaaaatgctcattatcacatttcaaatttcagatttttggatt

SEQ ID NO: 5681 - DNA, 42244 bp, Homo sapiens
  UPK2 gene - 118332236 - 118334479 of chr11; NCBI Entrez Gene ID: 7379; Build 35; sequence includes 20,000 bases upstream of initiation codon and 20,000 bases downstream of termination codon of the gene
ctcttatctcctggtggtccgtgcactaccttttgggggtgcacactgtaaatctaattcttcctccccatgatagcccttcaggtatttgagctttagtggtccctactctttctttttttttttttttctgagacagagtcttgctcttgttgcccaggctggagtgctgtggcacaatctcagctcactgcaatctccacttcctgggttcaagggattctcctgcgtcaccctcccaagtagctgggattacaggcgcccgccaccacgcccagctaatttttatatttatagtagagacagggtttccgcatgttggccaggttggtctcaaactcctgacctcacgatccactctttacttttgcctaaacattcccaggtcacaaaacaatggctcccatcataacacctggccaacttacaataaagcaagattatctgtcttctcctttattccaaataccatatctccagtaacgtgacttaacattggatttgctcctggcagtcatgttatgctgatgtccctttttcttttttctttcttttttttttttttttttgagacagagttttgctcttgttccccaagctggagtgcaatggcgtgacctcggctccactgcaaactccgcctcccaggttcaagtgattctcctgcctcagcctcccaagtagctgggattgcaggtgcacgccaccacgcccggctgattttttgtatttttagtggaaacagggtttcaccatgttagccaggctggtctcgaactcccgatctcaggtgatccgcccgcctcagcctcccaaagtgctgggattacaggcgtgagacaccgcgcccggcctgatgtccctttttcttttctttttttaagacggagtttcactcttgttgcccaggctgcagtgcaatggcgcggttggtctcagctcaccacaacctcagcctcccgggttcaagcgattctcctgcctcagcctcccatgtagctgggattacaggcgcctgccaccatgctcagctaatttttatatttttagtagagacggggtttcactatgttggccaggctggtctggaactcctgacctcaagtcatctgcccgcctcagcttcccaaagtgctgggattacggatgtgagccaccgcacccagcttgatgtccctttttctttctccctatcccctctgccccaccagtgctgatgtcttagactgaacttactaaaaccccggattctttttcacctgaacttcttctaagccatgtctggcccactgtgtattgctgaggtcttacatagatctctgatcactttattctgttaggtttacctaaccattctatacatggagatgattcttggatccttatctttcaatgtttactatccctcaagggttatatctgtgaaatgtgatactatattttcatataagctgttaataaaaatatttaacaggaaagagatggagacaaaaccctaaagtatgcaaatgttcttccgcttggtaccaatccatgtcacactgagaagtagcaagaataaatggttttgtaggtgggatggagtcagatcaaaatgagcctcaaaagaagaaaatagaaaggctcagaaggtttttgagtgaagagtgatacaaggaacaatctggtatagcaaaaaaacaaaacactaaccctggaactcaacagatctggatctgatctacaattccaggtctattgcttattagctgtagaactttgggcaaattaaccgctctgagcatctgtttcttctcctgtaaaatgcgataacaactaccttaggatttattgtgaagattaaaagagatagcatatatgacaagcctagtacataacaggtgctcaataaatgaagaagaaaaatgggagggtgaggaggaggagaagaaagtcatgctcaggacaggcccaggtctagtagtgtctcactctattgcccaggctagagtgcagtggcacgatctcggctcactggaacctccacctcccgggttcaagtgattctcctgcctcagcctcctgaatagcagggattacaggcatgtgccaccatgtccaggtaattttgtatttttagtgggggtttcaccatgttggccaggctggtcttgaactcctgacctcaagtcatccacccgccttggcctcccaaagtgctagaattacaggcatgagccatggcacctggccaggtctggtttctgaagagggactacacttgtggtaaacccaagtggaaagtccacctctgaggctactgtgagggcctgagatgactcactggggctggggcttggtctaggataatatgtatggaatggcaaagggaaggaagcagatctgaatgacatttccaaaggagaattgatccaccttggactcaagtgaggtgtggaggatgacagagagaggagtcacacgtagcaccaaggtttttactctgggtagtgacagggaagtacgaagggggtgatggcttggggaagatggttcatggttagtcactgcattaggcatggcagtaggataccaagtggacatgaccagtgaggaggtgaagcgattcgattagaacttcagagaaagagaagtcagagccaaagttatgttcctgggaagcaccgcatgccagtggtagctgcaggcattgggtgaggtttctgagggtgagctgggaagcgaaccaaggacaggaccctgtaggacacatccggagccatgacttagggctggagaagaaactgccccacactgctttccctccccaccattctctgcctcctggtcagagttgcaaagatcaacccaagctgacacccacccacccactgcatcactgcagacagaaatctgtgcagagcccactggaatcgaaaccctccaggactctgcttttctgtcctgatatcagaaaggacacaagttcttgtctaatcaacagaccccagcttgttgctgcaatcgtgcacttgaaaagggagaggcaggagggatgccacagagagagatgtggacagaggcaggcagggacaccttcgtgaagagcaggagagaaacagaagctgagggacaaaggggaggggagcgctgtgagtacctcaaaaggccgactgacagaggaggagaaaaagagacttaaggagggggcaggagaaaagattcgctgggaagctgatgaagtgcaactgagaaaactgttgccatggtgatgggtccagaggagggagtaggaatataaatcggattatgagttgggggagtctgtatgtgccgagggtgttcaaaacccagatgctgtccccccaacaccaggccctccccacgagatcttccactgcgagaagcctttcccagaggtcctccccaggccaggccaaggaatgcagtgagcagaggcactggagtggcccagggctcagcattccctcccctcctcccccaaaggcccctcagtgatacaaaagagccctgcacccccacaccaggtgcccctagcctcttggagagtcctctgcacagaccctcttcatcagcatcccgaggaggagaggaggatgttgttttaagcacctacttgctatgtggcaagcagcgtgttgggcacttcattccttgttcatttggtccccaccagggctctgtggggtggtattaccacctccattcatagacaggaagcgggtccaggacacaagctggaaggccgcaggcagagggcatgtaatcctggcccatccgctccaaagcccattctttttctcctagccctggcctgcctcacatggcctgcttcccatcccctgctgccatctcctgcacccttagggcacagtgggcatctcgggagctgctcagcggacagactagggtgaggctctaactccattcttggagatgaagggaactggggaggcttgaggcaaatatgccacagccagcgagactccaggctggggaggaggtgcagggcagcgctgagctcagggctggggaaatggggaggaagggctgaggtagagaggccccggggggtggggggaagctccaaggcccagccatttccggcagagcagaaactcccagcatgggccacgtggggagctggggaagctgcaagtctcggagtggtgagggagagcgctgggggtgggcatttccctgcaggtccctgcaagtggaagtggctggagggaggaaagagaggggagcagtttccctccttcgtcttccctcaggtttctgtacaagtaacagttttgcaaagggcaccagtatctgatgtgcatatcaaacagggcctggggaggcgggagaaggccaagctcagggctgcggcctgggcagctgtgccaagaccaccccccaaccccaggaggatgggataggattccaaagcattcccaccccttcccatcatacctggctgttccttctggtgaccatgaaacatcccccactgttctctcaggggaccagcctgagccacaccccaacttggaagtccctgttggggtgggtggggggtcagaaatgcctggactccaagaggggttaaaggtcacaattctgttgggtcccttggccactgggctggagaggccaggtctctgccccacctctccaaaggaggatagggctccttcctccgaaggcctggagggaagggcgtcccaggatcggcttgctttggtgcttcattcatacattctcctccaccctccaccctccaccagcatcccagggaggccctcctaaccctatttccctgtgcccatcagaggttctttcagacaactaagaagggggcccagcaggagccaaaaagatctaaggaagtgcatggggtggcggggtcggggggttggatccttctctttcctcctcctgccctcccgaggccctctggtctcttaccctttcactgagtcctagaacctccacacagccatttagtccttcagcatcctcttgcccagcttagtccctctgattcgcatgccctccagtttgaagagatttccagtgactcctccgacttgccaaatccaaggagcacatttcagcacatctcttcggttccctgtggtcctgatgctgctcgctgtgcctcccacaagcatcttccttgggcacctgggatactgctccctcctggctattctttttccttttagggaagtttctcggtttcctttgcagtctcctcttttcctttgcccataaatgttggggctccccaggctctgtccttcaccttgtcttctcactcagcatccacttgctcctctccaaggcttcagctgttgcgcctgtgctgacctttcctgtgctccagaccacacatccagccaccctcaacatacctccatccgggtgtccttcaggcacgtaaattggcaagttcaagacccaaatatctccacccagcccctcgccacagcctgcccctcccaccccccactgtgttctctagcccctgacggttctgtcatccaccctgctgcccaaaccaggacctgggagcatcctccttaactctgctccccaaaccgcacacaactgtccctgtcaaaccatcactagaccctgtcaattttgccctctgcctagagcagtagcctatgcctataatctcagcactttggaaggctgaggcggaaggatctcttgagctcaggagttcaataccagcctgggaagcacattgacaccccatctgtacaaataaaaagtttaaaaaaatagcagggcgcggtggctcatgcctgtaatcccagcactttgggaggcgaatgcaggtggatcacgaggtcaggagttcaagaccagcctggccaacatggtgaaaccctgtctctactaaaaaaaaaaaaaaaaaattagctgggtatggtggtgtgtgcctgtagtcccagctacttgggaggctgaggcaggagaattgcttgaacctgggaggtggaggttgcagtgagctgagatcatgccactgcactgtagcctgggcgacaaagcaagactctgtctcaaaaaaataaaaaaattttaaaaattagccaggcatgatggtgcacatctatagtcccagctaacttgggaggctgacacaggagggtcacttgagcccaagcttgagctgcagtgagctatgatcatgtcactaaactccattgtgggcaacagtagaagaccctttctcaaaaaaaaaaaaaagccctctccccaaatctcctcttctatcgtttcttgcctaggatctgatttctttttgtttgtttttttttttttttggaggcaaagtctcactctgtcaccctggctgcagggacatgatgcagcctccgcctcccaggtccaagaaattctcctggctcagcttcccgagtagctgggattaccggcaggtgccaccatgcctggctaacgttcgttatttttagtagagacggttttgccatattggccaggctggtctcaaactcttgacctcaagggatccgcccaaagtgctgggattacaggcacgagccaccacgccagcctagaatctgatttttttttttttttttttgagatggagtctcgctctgtcgcccaggctgtagtgcaatggcgcaatctccactcactgcaacctctgtctcccaggttcaagcaattctcctgcctcagtctcccaagtagctgggattacaggtgcgcaccaccacgcccagctaatttttaaaattttttagtagagatgggatttcactatgttggtcaggctggtctcgaactcctgacctcgtggtccacccgcctcagcctcccaaagtgctgggattacaggcgtgagccaccgtgcctggccttagaatctgattttaacagcctttaaaatgtctcccagctatccatccaacacaatctctacattgcagcaagagccatctgtattcaatacaatgtgatcagcacactctccagtttaaaacccttcaagggcttccttttatccttaggatcaaaattaaaattccttaaagggactgtaaaagccttccatcttttcccagctacttctccagtgacttccccaaattctactctgaccctccagcagacccattctctgaccttgtgcctttgcaggtctctcagcctagaacagtcttccctctttctcccctctcttcaccttcctaactcggacttaaattttaggtctccacttagttaccacttcctccaggtagctcttccacactactcaagctcgtgtaagttgccctttagtgagaagcctctctttttttttttttttttttttttttttttgaggcagagtctcgctctgtcgcccacgctggagtgcggtggcgcaatctcggctcactgcaagctccacctcccaggttcacgccattctcctgcctcagcctcccgagtagcgtgggactacaggcacccgccaccacggccggctaattttttgcatttttagtagagacagggtttcaccgtgttatccaggatggtcttgatctcctgacctcatgatccgcccgcctcggcctcccaaagtgctgggattacaggcgtgagccaccgcgcctggcctggtgagaagcctctttagcaagttatttaacttctttgtgccttaacttcctcattaataaaatgaggataataacattgcctgcctcacagaggttgttataaggattaagcaagaaaatatatgtaaaggggccaggcgcagtggctcacacctataatcccagcaccttgacctcctggcctccaggaatcctcccgcctcagccttccaagtagctgggactacagacgcatgccatcacacccaactaatttttttccttttttttttttttttttgaggcagagtctcgctgtgtcgcccaggctggagtgcagtggtactgtctccactcactgcaacctccgcctcctgggttcaagcaattttcctgcctcagccccctgagtagctgagattacaggtgcccaccaccacgcctggctaatttttgtatttttagtagagacggggtttctactgctactgttttgttttgtttttttagagggagtctcgctctgtcaccaggctggagtgcagtggcgcaatctcagctcactgcaacctccgcctcccaggttcaagagatcatcctcctgcctcagcctcctgagtaactgggactacaggtgcatgccaccatgcccagctaatttttttgtatttttagtagagacagagtttcaccatgttggccaggatggtctcaatcttttgacctcgtgatctgcctgcctcaacctcccaaagtgctgggattacaggcgtgagccaccgcgcccggccaggaattttttttttttcctgagatagagtcgttgctctgtcacctaggctggagtacagtggcccgatctcagctcactgcaacctccacctcccaggttcaagtgattcttatgtctcagcctcccaagtagctgggattacaggcgcatgccgccacacccggctaatttttgtatttttagtagagacaggttttcaccatgttggccatggctggtcttgaactcctgatctcaggtgatccgcctgcctcggccacccaaagtgctgggattacatgcgtaagccactgcacctgtctgaaacaaggaattttgccagcagactgcctttggacttaaactgcaactcttttctgagtctctagcctgctgccctccccatcacatttttggacttgccaagcctccacaatcatgtgagctaattccttaaaatctctctctctctgtttctctctctctctccatatatatgtatacacacacacaaacacacacacacacacacacacacatcctgtttgctctgtttctctggggaaccctaatacagttggtgccccagtagtccccaagctcagctgggccatcaccatcaaatacagccttcctcaaggctatttgtagctgcatcccctcctaacaacaactatttcaagctcttgctcctctctggcctccaaacccttctccctactgagcttcctatttctcagagaaagcagaggcctccagaagggagctcctttatttctcccatcttcctgacttttccaccccagccccccaaaaagcatagcatttttctgcatcattgcccccattcttctctctgcttggaaatgtcaccgttttggccaaaggctaacctgaaccccaatttcttcctctttcagaagtctctcagtgaattttactcatctctctcctgcatctttaactttaaaaataaaacacgcagtggtgtgccagtagtcccagacatttggacggctagggcaggaggatcacttgagcctaggagtttgagtccagcctgggcaacatagtgagactcccatctctaaaaaacagaacaaaacccaggaaatcaatagagaaaatcaatgaaaataaaatctggaaaagagttataaaatatatatatttttaaaaagataagcctttcctgtattccaatttcccctcaagttatccgtctctttcctttcctaggcaagcttcttcaaagagctgtctacactaactctagtgcctcaactcccagttacctctgcactcttacaggcagcttctgcctcctcacccgtaagcagctgctctatatgcataacccccaagatactaggcccagcggacattttaatagttcttaccttcaatcctgatcttcatactatttgacacctcttttttgaaactctccatccactccctcctgattttcctcttatctttttctttttcgtttttggagacagggtctctttctgtcatccaggttggagtgtgatggcatgatcagagctcaccgcagccttgaactcctgggctcaagtgctcctcctgcctcagtctcctgagaagctgggagtacagacctgtgccactacatctggctacctcataattttcattcctccttcatcagctcctcttgctgtatctgtcctttaaatgctttatttcccagaattctgtccttggctgccttctcccactctccttccactgctcccctcaaggactctcttccacaggcatgattttaaccagtgccacctcccctgtctgcatcccacacctctcctccatgtttccagaatcctatgctcaatgttgagttgcccaagatatttgtattcattattttttactgtatagtaaattatcccccaaatctagtggcttataaaaataaacatttggccaggtgcggtggctcatgcctgtaatcccagcactttgggaggctgaggcagacagatcacttgaggtcaggagtttgagaccagcctgaccaacatggtgaaacctgtctctatcaaaaacacaaaattagccaggtgtgttggtgggtgcctgtaatcccagctacttgggaggctgaggcaggagaatcacttgaacccaggaggtggaggttgcagtgagccaagactataccactgcactccagcctgggcaacagagcgagattctgtctcaaaaaaaaaaaaaaagaatttatcctgagagtcaggagtttgggagagacctacctgggtggtttgggctcagagtgttttgggaagctgcagtgaagatatcaacctgggccacagtcatctgaagacttgactgggctgaaggaatcggtctccaatcttgctcattcccatacctactgcctggaagtctcacaacctcataggtctttggcaggaggtctcagtcccttgccacacagacctccccacagaggagctccaacatcctccagagtgagcaccccaagagaggatgaggaggaaggcaccctacctagcctcagaagtgatgtgtcatcacttctgttgtatttattggccacacaaaccaatcctgatgtgatgtgggagggaaccatatgaggacacgaatacaaggaagcagggatcattcagagccatgtgggaagctggcagccacaatacctcagacttatcagatccacaagtgaactttattttttttctttttctttttatttattattattattattattattattttgagatggagtctcgcttctttgcccaggctggagtgcagtggcgcgatctctgctcactgcaacctccgcctcccaggttcaagcaattctcctgcctcagcctctcaagtagctgggattacaggcacgtgccagcatgcctggctaatttttgtatttttagtagagacgaggtttcaccatcttggtcaggctggtctggaactcctgacctcaagtgatccacccgcctctgcctcccaaagtgctgggattacaggtgtgagccactgtgcccagcccacaaatgaacttccttctccccagtcctcccttcaaatctgctccaagccatacatctggaaattgttcttgattcttccatcctaaaattactctgcagtcagtcactgattccagtcaatctttccctaaaatcactgcagtctgtctgcttctctccactcccatgttcattgcttggccatgaactttttcacctggatcattttgtttctcacttagtttccctgctttatgtcttacctgctgccaatccattctccacactgttgccagaatgatctttacacattttaaactcctctaaggcttgctaagaaacacgctccttagcgtgggatacaaagccagtggctgtagctcccaccatgcccatctttgaatacttctctccagccaagatgtattgtttgcagttcccagagggtgtcagcataattcacatccctaagctttttcataggccgctccctctttttggaatatgcccttccacttatctcaaccaggctaactctgattcattcttcaaagcccagcaagttttgagagcagaaactgtgtcttgtcctctctgtatctcagaccctaatacagtacccaccatagaggaattgctcaacaaatgtgtgatgagtgaacaaatgaccgggcagttcttgtgtgcctggcacccctgtggcatgcttggcacacaggaagagcaggtccacagctcagtcactttccccctcggactacctttccctgtccaaatagctccctctgcatcagtaacacagctggaaaaacaaattgtgaatcatatccaacttcattccctgtgaccttgggaaagtcatttattgtctctagtcttcttctgcaatgaaggttaataaaaagataaagtgaattacttacattaatgtttattgagccagatactgtgctaggcactcataaataaattcgcttgaggggccgggcacattggctcatgcctgtaatcccagtactttgggaggctgaggcaggcagatcacttgaggccaggagttcaaaaccagcctggccaacgtggcaaaaccctgtctctactaaaaatacaaaaaactagctgggcgtggtggcatgtgcctgtaatcccagatactcaagaggctgaggtgggagaattccttgaacctgggaggcagaggctgcagtgagccgagtcatgccagtgcattccagcctgggcgtcagagccaaaatccatttccaaaaaaaaaaaaaaaaaaattgccttagggagagtcacaatatccaaacgagacaggtttttaaattttatttatttaattttattattatactttaagttctagggtagttgtgcacaacgtgcaggtttattacatacgtatacatgtgccatgttggtttgctgcacccattaactcattaggttcatttacattaggtatttctcctaatgctatccctccccctgccccctaccccatgacaggcccttatatgtgatgttccctgccctgtgtccaagtgttctcattgttcaattcccacctatgagtgagaacatgtggtgtttggttttctgtccttgtgatagtttgctcagaatgatggtttccagcttcatccatgtccctgcaaaggatgtgaactcatccttttttatggctgcatagtattccatagtgtatatgtgccacattttcttaatccagtctataattgatggacatttgggttggttccaagtttttgctattatgaatagtgctgcaataaacatatgtgtgcatgtgtctttatagtagcatgatttataatcctttcggtatatacccagtaatgggatcgctgggtcaaatggtatttctagttctagatccttgaggaatcgccacactgtcttccacaatggttgaactagtttacactcccaccaacaatgtaaaagtgttcctatttctccacatcccctccagcatctgttgtttcctgactttttaatgaccgccattctaactggtgtgagatggtatctcattgtggttttgatttgcatttctctgatagccagtgatgatgagcatttttcatgtctgttggctgcataaatgtcttcttttgagaagtgtctgttcatatcctttgcccactttttgatggggtttttttcttgtaaatttgtttaagttctttgtagattctggatattagccctttgtcagatgggtagattgcaaaaattttctcccattctgtaggttgcctgttcactctgatggtagcttctttgctgtgcagaagctctttagtttaattagatcccatttgtctattttggcttttgttgccattgcttttgatgttttagtcatgaagtccttgcccatgcctatgtcctgaatggtattgtctaggttttcttctagggtttttatagttttagatctaacatttatgtctttaatccatcttgaattaatttttgtataaggtgtaaggaagggatccagtttccgctttctacatatggctagccagttttcccagcaccatttatcaaatagggaatcctttccccatttcttgtttttgtcaggtttgtcaaagatcagatggttgtgagacaggttttataccctttaattttttttttttttttttttgagacggagtctggctctgttgcccaggctggagtgcagtggcgtggtctcggctcactgcaactactgcctcccaggttcaagcaattctcctgcctcagcctcccgagtagctgggattacaggcacctgccaccatgcccagctaattttttgtatttttagtagagacggcatttcaccatgttggccaggctgatctcgaactcctgacctcgtgatctgcccacctcagcctcccaaagtgctggggttacaggcatgagccaccatgcctggcctggttttataccctttttacagcagaggaagctgaagctcagagcagttagtgaggtatgtaacttggcaaaagtcacaaagctggaagaagatttggggtaagtggttgtatcagaggctactttttttttttttttttttttgagacagtttcactcttgttgcccagactggagtgcaatggcgcaatctccacctcccgggttcaagcgattctcctgcttcagccttccaagtagctgggattacaggcatgtgccaccacgcctggctaattttgtatttttagtagagacagggtttctccatgttggtcaggctggtctcgaactcccgatctcaggtgatccaccctcctcggtctcccagagtgttggggttacaggcgtgagccaccacgcagggcggctacattttttaaaatggagcattcaagtctcctccaaccctgaatgactggtattttctcatcctcacagcattttccagcctcaggtctcaaggatagaggtgccaccacttcccaatggaccaacatttggtgagcaccgcatcttacctccaaatccaatcctccaggactcccccatccctggctgttcctaggattatgacaatgatctccagcatttcttccacacctttattttaaaccatttttacacctgtcacatagtttgacctcctgagtaaggaaggggtcttctctttatatactttatttccagctctgtcacccaggctggagtgcagtggtgcaatcatggctcaccaaagcctcagactcctgggctcaagccatcctcccgccatagcctcccaagtagctgggactggaggcatgtgccaccatgcccagctcattgtttttttgttgttgttgtttgtttgttttttgagatggagtttcgctcttgctgcccgtgctggagtgtaatggcatgatctcagttcactgcaacctccatctcccgggttcaagtgattcttttttgtatttagtaaagaggggatttcaccatgttggtcaggctggtcttgaactcctgacctcaggtgatccacccaacacagcctccaaaagtgctaggattacaggtgtgagccaccaccctggcctgttttgtttttgtttttgagacggggtctcgcactgtcacccaggctgaagtgcaatggtgggacctcggctcactgcaacctccgcctcccgggttcacacaattcccctgcctcagcctcccaagtagctgggattacaggcgcacaccaccatacctgctaattttttgtatttttagtagagacggggtttcgctatgttggccagactggtctcgaactcctgactttataatctgcccgcctcagcctcccaaagtgctgggattacaggcgtgagccaccgtgcccaggcttttttttttttttttttaatagagaagagatgtcactatatcacccaggctggtcttgaactcctgggctcaagcaatcttcccaccttggcttcccaaagtgctgggattacaggctgtgagccacagcgcctggccataatttttttttcagttttgtagagatggagccttgctgcgtcacaaggctggtctcaaactccaggtcccaagtgatcctcctacttcagcctcccaaagtgctgagatgacaggcatgtgtcactgtgcctggtgagtctgccattttttatttcattttattgagatggagtctcactctgttgcctaggctggagtgcagtggcatgatttcagctcactgcaagttccacctcctggattcaagcgattctcctgcctcagcctcccaagtagctgggattacaggcatgcatcaccacacccggctgatttttgtatttttagtagagacagggtttcaccatgttggccaggctggtctcaaactcctgacctcaggtaatccacccgcctcggcctcccaaactgctgggattacaggcgtgagccaccgcacctggccaagtcttccattttaaatgtgagaacattgaagtccacctaaagttacatggtatctcatcaacaagaggacagtagctgccatcagaggctgacatggccatgcagccaagtagacatgtttttctaattgactgggaggcagagagtggcactctggaaggagaaccctgggcatgtcagacggacctgggttctgatcccagctctcctggttgaagaactgccatagttcaagtgaaaaaaaaaaaaaaaaaaaaaaggtgccacagtccagaaagaagtttgttttaggagatagtcttctaggctgagcagactagagctgttaagagctccctgagggcagagacttatcttacctttatatccctggtggctagtgcagttccaaggacatagttggtacgcaataggagtgcttgaataggagatttggaagagaggaggcaggggagggaactcaagagagtttagaatcaagaatccaaggaggagacagcctagaaagagtgggtccaagacagagacttcaggcatgtggccctggttcccttactccaagccattgggaaatcctccagaggaacatggtgctgtggctttaactgacttcagcattgtcaatgaatctgctctgctaaaagagttatcctcttgctcctgggcttggcctccccctcctctcagctccccaaacccttctcggctgctgtgatgggataattagatgcgagagctcagcacagatgatgctccagttgcttagcaactaatggtttccatggagaccgcaaagcacagcctccagagcagccagtgagcagctcggcagggcagggagaagacgcaactccccgctcctccagaaacctggggagggctggggtggggaaggtgggggggggggattggagggagaagggagagcttaaaggcacagggccctcttatccctttaaaatctgatcagagatctgccctcccctactccactctgtaccactcataattttagatggggatgggggcttaagagtggacccaactcaacccaccctgcaataaacccaacctcttctttctgcttcttggttgtgaatgaggagaaagacctcccagttcaagtgtaaacaacttactggtgggtgacaggttttgaggagtaccaggaagatcccctcaccctggcattccaccatttaatctgtcccctctctcccaagttgtccttaatgtgcaagagaccctctttccatttgtgcagtggtggtggaatcaaaagccaaggtgcaggaaaaacagaaccaaattcttcacccaaaagcagcctgttcgggcagattgggaaggaacacctgccctgatccctgatgtccgtggaagaggatccagctgggggtggggatgctgtttaccaatacagagcagctggcaacttcaagtgtgggcctttcagaccggcatcatcagtgttacggggaagtcactagaaatgcagaattgattgggcacggtggctcacacctgtaatcccaacactctgggaggccaaggcgggtggatcacttgtggtcaggagtttgagaccagcctggccaacatggtgaaacctcatctctactaaaaatgcaaaaattagctgggaatggtggcacatgcctataatcccagttactcaggaggctgaggcaggagaatcgtttgaacctgggaggcagaggttgcagtgagccgagatcacgccactgcactccagcctgggtgacacagcgagactctgtctcaaaaaaaaaaaaaaatgcagaatttcaggcttcaccccagacccactgcatgactgcatgagaagctgcatcttaacaagatccctggtaattcatacgcatattaaatttggagatgcactggcgtaagaccctcctactctctgcttaggcccatgagttcttcctttactgtcattctccactcaccccaaactttgagcctacccttcccaccttggcggtaaggacacaacctccctcacattcctaccaggaccctaagcttccctgggactgaggaagatagaatagttcgtggagcaaacagatatacagcaacagtctctgtacagctctcaggcttctggaagttctacagcctctcccgacaaagtattccactttccacaagtaactctatgtgtctgagtctcagtttccacttttctctctctctctctctctcaattttctgagacagagtttcacttagttgcccaggctggagtgcaggggcacaatctcggctcactgcaacctccacctcctgggttccagtgtttctcctgtctcagcctcccgagtagctgggattacaggcacacaccaccgcgttagtttttgtatttttggtagagatggtgtttcgccatattggccaggctgatctcgaactcctgacctcaggtgatccgcccacctcggcctcccaaagtgctgggattacaggcatgagccaccacgcccggctgatctcttttctattttaatagagatcaaactctctgtgttgcctaggctggtcttgaactcctggcctcgagtgatcctcccaccttggcctcccaaagtgctgggattacaggcatgagccactgtgcctggcctcagttctactacaaaaggaagccagtaccagctaccacccagggtggctgtagggctacaatggagcacacagaacccctacccagggcccggaagacgtcctgactcctctcccctccctctgctcagaactcctctgcttctttctgatgtagcccagggctggaggaggcagtcagggaagttctgtctctttttcatgttatcttacgaggtctcttttctccattctcagttcaacaaatggttgctgcccaaggctgactgtgcccacccccaacccctgctggccagggtcaatgtctgtctctctggtctctccagaagtcttccatggccaccttcgtccccaccctccagaggaatctgaaaccgcatgtgctccctggcccccacagcccctgcctctcccagagcagcagtacctaagcctcagtgcactccaagaattgaaaccctcagtctgctgcccctccccaccagaatgtttctctcccattcttacccactcaaggccctttcagtagccccttggagtattctcttcctacatatcagggcaacttccaaactcatcacccttctgaggggtgggggaaagacccccaccacatcgggggagcagtcctccaaggactggccagtctccagatgcccgtgcacacaggaacactgccttatgcacgggagtcccagaagaaggggtgatttctttccccaccttagttacaccatcaagacccagccagggcatcccccctcctggcctgagggccagctccccatcctgaaaaacctgtctgctctccccacccctttgaggctatagggcccaaggggcaggttggactggattcccctccagcccctcccacccccaggacaaaatcagccaccccaggggcagggcctcacttgcctcaggaaccccagcctgccagcacctattccacctcccagcccagcatggcacccctgctgcccatccggaccttgcccttgatcctgattctgctggctctgctgtccccaggggctgcaggtctcttccatctctggcaggggtgggaagggggctgggggcctggacagggagcactgtaccttccagggctctcaaagagaggtctggacagttgggagtcagggctggtgatggcagtgactgggtatcagacactgggctcagggtacactcctgatcctcctccagacctaggaggcagagaggtgtgggcaaggatccgatgctgcggggaggggtgaggttgggcgctgcccgactcctggcatccaggttctggctctggggaccgcttggtggagggtgcagcttctgcagcccaagcctgccacctggtggtcatactggcacaggcctggctgttctgcccagggttcacagagtggaaagggagatggctccaatgggaccgggccagatctgttggccaggaggggtcagtccccatcggagctccctcctgcctcccatcagacttcaacatctcaagcctctctggtctgctgtccccggcgctaacggagagcctgctggttgccttgcccccctgtcacctcacaggaggcaatgccacactgatggtccggagagccaatgacagcaaaggtctgctaccttctcccaaggcatccctctagtccccaaagaccccttcctgcgacaccctctgcacccttttccccattcatgccttcctgtccacccgtctcctggggtacccacactctaaaagctgccccttctccttggggcctccagaaacttgacccagtcttcccctcccgccacttctgcccagtggtgacgtccagctttgtggtgcctccgtgccgtgggcgcagggaactggtgagtgtggtggacagtggtgctggcttcacagtcactcggctcagtgcataccaggtgacaaacctcgtgccaggaaccaaattctagtaggtactgggtccagcctgaggcacctagggaagggggtgcaggaagagagagaagctagtgtgggggagatctggtgggcatgaggagagggtgagggcacagcaaaagggggtgaaagctgggcctcttggaggagtgcacataggggagacacagctgtgagggtaggtggcccaggctggagcccctcttcctgtaagtcccaatactcactgagggttctctactctctcccaaaccacaaaagcatttcctacctagtgaagaaggggacagccactgagtccagcagagagatcccaatgtccacactccctcgtaagtaacactcccgcctccctttcccatctcagcggccacaaacgcttccctgaccattcctgcctcatccccagtctgggttgcctgtgcctccccgtgcgccctcggggcccctgcttacctctatcctagcacggaaccttcggcatggctactgcacactcagctaaaggttcctcgtgggcagggactgtgtcctcttaacttttcctcagcggctgacataggagatgcttcataaatgtctatgtgatgggtgtttggatccatcagctggttggttggttggttggttggctggctggctggctggctggctggctggttggttgggcagtctgttggctggatgagtgtgaggccgtgagcctcaggcaggctgggggtctctcccgcccacagtggtctcccctctcttttgacaggaaggaacatggaatccattgggctgggtatggcccgcacagggggcatggtggtcatcacggtgctgctctctgtcgccatgttcctgctggtgctgggcttcatcattgccctggcactgggctcccgcaagtaaggaggtctgcccggagcagcagcttctccaggaagcccagggcaccatccagctccccagcccacctgctcccaggccccaggcctgtggctcccttggtgccctcgcctcctcctcctgccctcctctcccctagagccctctcctccctctgtccctctccttgcccccagtgcctcaccttccaacactccattattcctctcaccccactcctgtcagagttgactttcctcccattttaccactttaaacacccccataacaattcccccatccttcagtgaactaagtccctataataaaggctgaggctgcatctgccacatgtgtttccctttagtgggctctaccttggctcaaacctgtggaatctatgtccaagctgcaggtgctcctggtcccctccctgccccacagcccagagttacttttcccatgaggcaggcaggggccagtaagagcccagcagtcagagttctcagagacacaccggggctgtgggtttggcagcatccacagtacacagtgggccactcaactaggggtgcaggtcagggcagaagctggggctggtgccccatgtggaggcctggaggcctgggggtgggggtggggggcaggcagagcaagggaagtgctagggaaaagaggagaggatctgtctgggaaaagacaggccaggtgcagtggctcatgcctgtaatcccaccactttgggaggccaaggcggtcagctggcttgaggtcaggagtttgagaccagcctggccaacatgatgaaaccccgtctctactaaatattaaaaaaaaaaaaatagccaggtgttcgggcaggtgcctataaccccagctacatcccagctctcatcccagtggctgaggcatgagaatcgcttgaactcaggaggtggaagttgcagtgagccaagatcacaccactgcactccagcctgggtgatggagtgagaccctgtctcaaaaaaaaaagacaaagacgaggccaccaggctgagacccaagaatggggcattggggtcaggagagagaagaacaggctaaaagtattctaggaggtgagaacgaaagcagaagaaccctggttggagtgggccaagagtggaacagcctagtactgagggaaaaaggcaggagtggccacattccttcacttttgtcctctgcagtatataacatattctttttaaggatcagtgatctttgcattgtacttagggtaaagaccttcaaggccaggcctgatcccgtaactgttcctcagctcttaccagattccctccaatttcccaggctccctcttgcctcagggcctttgcacaactattccatacagccacactgatattggcaccaccccccaacacctccattccggttttcatagttagcttactgtcccttctccagggaagccttctctgacctccattttctcctatttggttgggttccactctcctgtctttcatagcattaccacggtttataaccatgggtttgtgtgattatttggttgtctctcccatcagactgtaagcagttgctttgctcccaagggcatatggtatctttgctccacagtgcctgggacacagcagatactcaataaatgcttgctgaataagtgaacaaacaaatgcacaaatgaatgaaccagcctctaaagagaaggacagagctaggaaagtgcccaaaagaaagaggaaggaaaggaaggaagaaaggaagaaagagagaggtaaagagagagagaaagaaaaagagagagagaaagcaagcaagcaagcaagcaagcaagccgggcacagtggctcatacctgtaatcctagtactttgggaggctgaggcaggagggttgcttgagcccaggagaccagcctggacaacaaggcaaaaccccgtcgctctgtcgctctgacacccaggctggagtgcagtgtctcaattttagctcactgcagcctcaaaatcctgggctcaaacaatccttccgcctcaggtctctgcatagctagaaatacaggtgtgtaccaccatacccagctaacgtttaaatgtttttgtagagttggcatctcactatgttgcctaggctggtctcaaactcctgggctcaagtgacactcttgccttagcctctcaaagtgctggtgttacgggatctctgggatgtcaacttttctggctggaaacctctgtggccatgacgtctttgcctgagttcttgtcatgcatccaggaagaatgaagtatgcagacaagtgaagggtgaagaaaagggtttgtttgtttgtttgtttgtttgttttgagacggagtttcgctcttcttgcccaggctggaatgcagtggtgccatctcagctcaccacaacctctgcctcccaggttcaagcaattctcctgcctcagcctcctgagtaggtgggattacaggcatgtgccatcatgcctggctaattttgtatttttagtagaaacagggtttctccatgttggtcaggctggtctcaaactcccgatctcaggtgctccaaccaccttggcctcccaaagtgctgggattcagttgtgagccaccgcgccaggccaaagagttttatttagagttcggacagcttggaggagtgctcagctcctagcagagaggaggccctggagagggtggctcctctctgcagacaagtcattctgatgtctctgcaggtctctgaagctctcagaagagagggtagctcctctccaccagcaggtcgtctctatggctctcagcagagagggtacaccctccgcagctggttgtcccatcgtcacctgctatcagcagaaagggtactcctttctgcagctggtcgtcaaatcccattgtctctctgccctcttcatcctctggccatcctctgccctgctctggctgagcccagggcttttatggacatcagaggggagaaaagtccataggcagccgtgggcaagcccataagaggcatcacaagtccccactccggtcagtgggactggcagcccagcccccagctttcaggccctccctggcctgagggtggggacttactgagggccccaccccttcccacccaggactctgtctgcctcccactgccattcatgacccctgggcttggccccaaccccgctcctttctgagatcggagcaggtgctgggagcagagagaggccaggcagtgggagcagacacccataagcctgcagggatgggggctcagggtggggggttcttcctggggcccctgaaggtgcagagacaccagggtcctgtgtctgggaggggggccgcagctgcacccaggacctcccaccctgccaactcagaaggggcagggctcctgcttttccctggctcctgcctgcttcctggagcaggaggccgaggtctgcggccgcacccaggaaggcagatcctgcctgttccgggctcccccaaaagcacaggaaggcaaggatccacagctgcggtttgggcagctgtagcctcctgggcagggctcctgcctgctccatagagcaggaggtctgggtctgcagctgcgtttgggtggctgcagcggctcggggagctcccttcccaactcagaaggggcagggctcccattggccccacagagtatgcagacccagccgcggttacctgctgcagctgacatgatgccagcagccacggccatcactgggattacagatgtgagccaccacacccacctacacattatttaaaattgtgacaaaatatacataacataaaatgtactactttggccagatgcagtggctcacagctgtaatcctagcactttgtgaggcgggcagattgcctcacctcaggagttcgagaccaccctgggcaacatggtgaaactccatctctactaaaatacaaaaaattagctgggcgtggtggtgcgcgcctgtagtcccagctagttgcgaggctgaggcatgataattgcttaagcctgggaggcggaggttgcagtgagctgagccgagatcatgccactgcactccagcctaggcgacagagcaagactctgtctcaaagaaaaaaaaaaaaaaaagtactactaatttaaccggttttaaatggacatttcagtggcattaagtatattgacattgcacaactatcaccagtgtccattcccaaatttttcatcatcccaaatagaaactctatacccattaaacaataaccctctactactaatcccttcagcccccggaaactaccattttactatgaatttgggtcactgtaggtacctcatataagaggaattatataaaatttatcctgttgtgtctggcttatttcactaaggataatgtcttcaaggttcatccatgtcctagcatgtatcagaatttcattcgtttttgtttttgtttttgtttttttgagaccgagcctcaaaaaaaggctgattccagaatagctgggattacaggcgtgcaccaccatgcctggttaatttttgtatttttagtagagacggggtttcgccatgttggctaagctggtctaaactcctggcctcaagtgatctgtccacctcggcctcccaaagtgctgggattacaggtgtgagccactgcacctagcagcattattcctttttatggctgaataatattccatcatatggatatcccacatttggtttatctgttcatctgttgatgaacacttgcgttatttccactctttggctattggctattgtgaataatgttgctgtgaacatgggatgcaaatattggttcaagtctctgctttcagtccttttaggtatataatcagaaatagaattgctgaattatatggtaatcctatgcgtaatttttttgagggactgccaaacttttctttttcttgtttttaattttttttttttttgagacagagtttcactcttgtcacccaggctggagtgcggtggcgtgatcttggctcactgcaacctctgcctcttgggttcaagtgattctcctgcctcagctgggatcacaggtgtccaccacaactcccggctaatttttgtacttttagcagagactgggttttgctatgttggccaggttggtctggaactcctaacctcaagggatccacccgccttggcctcccaaagtgctgggattacaggtgtgagccgccatacccagcctgtttgttttttctaacagccatcctatgaagccatcctatgaagtatgaagtggtatctcactgtggttttgatttgcatttctctaatgatatatacatctcttcctgtgcttattgattatttgtatattttttctttggataaatgtcaattcaagttctgtgcacattattttttttctttagagacaggattcatgcacagtggctcatgcatgtaatcccagcactttgggaggcagaggcaggaggattgcaggagtccaggagtttgagaccagcctaggcaacatagtaagagctcatctctacaaaaataaatcaaaattggccgggcgcggtggctcacgcctgtcatcccagcactttgggaggccaaggcgggcggatcacctgaggtcaggagttcaagaccagcctcaacatggagaaactctgtctctactaaaaatacaaaattagccaggcatggtggtgcatgcctgtaatcccagctacttgggaggctgaggcaggagaattgcttgaatctgggaggcagaggttgcggtgagccgagatcgcaccattgcgctccagcctgagcaacaagagtgacactctgtctcaaaaaataaaaataaaaaaaataaataaatcaaaatttagccaggcatggtggtgctcaggtagtcccggctactcaggaggctgaggtgggaggattgcttaagccctggaggttgaggctgcagtgagccatgatcacgccactgcactctagcctgggtgacagaataagactgtctcaaaaaaaataaaataaaacaatagagagaaggtcttgctctggagatcttcctacctttgtctcccaaagtgctgggattacaggcttgagccttggtacccataccaaacatatatttgtataattagggtagaaaaattatcattaaacttattattgttggccaggtgtggtagctcacacctgtaatcccagcactttgggaggctgaagaaggtggatcacctgaggtcaggagttcaagaccagcctggccaacacggtaaaactccgtctctactaaaaatacaacaactttgatggcagaagggaaaaaaaaaagtatagtaccagccgggcgcagtggctcacacctgtaatcctagcactctgggagtccaacgcgggcagataatttgaggtcaggagttcaagaccagcctggccaacatgatgaaaccccgtctctactaaaaatacaaaaattagccaggcgtggtggcaggcccctgtaatcccagctactcgggagactgaggcaggagaatcgcttgaactcgggaggcagaggttgcaataagccgaagagcacggcattgcactccaacctgggcaacggagcgagactccaactcaaaaaataataaaaaataaataaataaataaataaaaaataggccggacacggtggctcaagcctgtaatcccagcactttgaaaggctgaggcaggcagatcacctgaggtcaggagttcaagaccagcctggccagtgtggtgaaaccccatctctacccaaaatacaaaaattagctgggtgtggtagcacacgcctgcaatcccagctactcgggaggctgaggcaggagaatcgcttgaacccacaaggcagaggttgcagtaagctgagattgtgccaccgcactccagcctgggcaacaagagcgaaactccatctaaaacaataaaaaataaataaaataaaataaataaaaaataaaaatacaaaaattagctgggtgtggcagtggcaggcacccgtaatccaagctactcgggagtctgaggcagaagaatcgcttaaacccaggaggcggaggttgcagtgagccgagatcacaccactgcactccagcctgggcgacagagcgagactccatctcaaaaatatatatatatagacacacaaaaaattagccaggcgtggtggcgggtgcctgtgatcccagctactcaggaggctgaggcaggagaatcgcttgaatacaggaggtagagattgcggtgagccaagatcatatcactgcattccaacctgggcgacagagtggaactctacctcaaaaaaaaaaaaaagattattgttattgcaattaaaggtagactcccagcaaacttttttgttgttgagacagtctcgctctgttgtgcaggctggagtgcaatgatgcgatctcagctcactgcaacctatacctctcgaattcaagggattctcctgcatcagccttccaagtagttcggattacagatgcgtgccaccacacctagctaatttttttttcttttttgagatggagtcttgctctgtcgcccaggctagagtgcagtcatgcgatatcagctcactgcaatctccgcctcccaggttcaagcaattctcctgcctaagcctcccgagtagctgggattacaggcacatgccaccgcgcctggctaatttttgtatttttagtagagtcagggtttcaacatcttggccaggctggtctcgaactcctgacctcgtgatccacccgcctcagcctcccaaagtattgggattacaggcgtgagccaccgctcccggccaattaatttttatatttttagtagagacggggtttcaccatgttggccaggctggtcttgaactcctggcctcaggtgatctgcccacccctgcttcccaaagtgctaggattacaggtgtgagccaccatgcctagccaaactttttttcttattatgattattagagatgaggtcttgctatgttgctcgggctggtctctaacacttgggctcaagtttgagtttgaaaccagcctaggcaagaaaggagatgactgtctcaaaataaagcaaattttaaaaaataaaaaataagctgtttccaatcacaagcatttgcagagtgggagaggaaactgctgatttcactttagttaaatcaacatctattgagggtctcctatgtaccaaatcctaaaatactatgcaaagtttctggtctaggacacaggcaacaagcaacacagtaccgggtggatggtctctgctaggggaacccgggatgccacaccaaggaaccagaggaggatgcctcaccccctgggcaagtctgggacagttttaggactaaaagaataacagtaatgaattataacctaatcaacaaaataaggatccattgagttgggccaggcgcgatggctcacgcctgtaatcccagcactttgggaggctaagccaggtggaacacttgaggtcaggagttcgagaccagcctgcccaacatggtgaaactccgtctctatgagaaaaaaaaaaaattagctgggagtggtggcacatgcctgtaatcccagctacttgggaggctgaagcaggagaatcacttaaacctgggaggtggaggttgcagtgagccgagattgccccctgccctccagcctggcgaaagagcgagactccgtctcaaaaaaaaaaaaaaaatccattgagtctattcttattttttactttttgacacagagtctcattctgttgcccaggatggagtgcagtagcatgatcacagcccactgcagccttgatgaccagctaatttctaaattttttgtcaagacggtgtcttgtcatgttgcccaggctggtccaaaactcatgtgcttaagccatcctcccaactcagccttccaaaacgctgatattacaggagtgacccaccgtgcctgtcgagtacattctaacaaatacgagaggagaaaaagctcttctttacaatagaatgctgactaaataaatggagaaggaatgatagatttagaaaaattatcattttataaccatcatactaatgattgattcagtcaagaatcataaatgaatgttattgagtccaagtttaataaggaacaggattttagataatttcagaatatctccccacaaattacttactaattacaaaagggaagaaagataactttacagtagagaaatctgatagataccactaaatgaagtgattgaagttaaacatcacgaataacgagacaaactgacaccatctgcttcttgatgccatgcactaagaaagaaacatcacttctttggcccaaaagctccctcagctggtaaacaacttcagcaaactttcagcatacaaaatcaatttacaaaaatcactaggccgggcgcggtggctcacgcctgtaatcccagcactttggtaggccgaggcaggcagatcacgaggtcaggagatcaagaccatcctggctaacgcggtgaaaccccgtctctactaaaaatacaaaaaattagctgggcgtggtggcgggcgcctgtggtcccagctactcgggaggctgaggcaggagaatggcgtgaacccgggaggtggagcttgcagtgagccgagatcgcaccactgcactccagcctgggcgacatagcaagatccgtctcaaaaaaaaataaaataaaataaaatacaaaataaaataaaaattgccaatgaacattattgactagcattcaaataatctaacattgagctttcctgacaaagacaccaaaagcaattgcaacaaaggcaaaatttgacaaatgggatctaattcaatttaagagcttctgcacagcaaaataaactatcaacagaataaacagtcaacctaaagaatgggagaaaatacacatctgacacaggtctgatatccagaatctacaaggaccttaaacaaattcacaatgaaaaaaacaagcccattaaaaagtggacaaaggatgaaacacttttcttttctttctttctttttttttcttagatgagggtctcactctgtcacccaggctggagtgcagtggtgtaatctcagcttagtgcagcctccgcctcccaggctcaagtaatcctcccacctgagcctcccgagtagctgggacaacaggtacacgccaccatgcccagctaatttttgtagcttttgcagagatggggttttgccatgttgctcaggttggtcttgaattcctgagctcaagtgatccacccgcctgagcctcccaaagttctgggattacaggcacgagccactgtgaccagccaacagatgcttttcaaaagaagatatacacgtacatgagaaaatgctcatcaccaccaatcattagagaaatgcagatcaaaaccacaatgagataccatctcacaccagtcagaatggcttttttttttttttttgagatggtctctctctgttgcccaggctagagtgcagtggcacgatcttggctcactgcaacctatgcctccggggttcaagagattctcctgcctcagcctcctgattagctgggattacagacgcgcatcaccatgcccagctaatttttgtacttttagtaaagacggggtttcaccatgttggccatgctggtctcgaactcccgacctcaggtgatccacccgcctcggcctcccaaagtgttgggattacaggcgtgagccactgcgcccagccagaatggctattattcaaagtcagaaaataacacatgctggcaaagttgtggacaaaaggaaagccttatacaccgctggtgggaatgtaaattacttcagccattgtggaatgcagtttggtgattaccattcaacccagtaatcccattttcgggtgtatacccaaaggaatataaatcattctaccataaagacatatgcatggccaggcgcggtggctcacgcctgtaatcccagcactttggaaggccaaggcaggaggaccacttgaggtcaggagttcgataccagcctggccaacatggtgaaacttcgtctctactaaaaatacaaaaattagctgggcatcattggggccgcctgtaatcccagctactagggaggtggaggcaagagaatcgcttgaacctgggagctgaggtcacgccattgtactccagcctgggcaacaagagcaaaggaagggaagggaaggggaggggaggggaagggaggagagggaagagaagggaggagggaagggaggagggagggagggagggaaggaagaaggaaggaaggaaggaaggaaggaaggaaggaaggaaggaaagaaagaaagaaaggaagaaaaagaaagaaagaaagagagaaggggtacatatacagcacggtacatatacatcatggaatactatgcagccataaaaaagaatgagatcatgtcttctgtgggaaccgggatgaagctggaggccattatccttagcaaactaatgcaagaacagaaaaccaaatgccacatgttctcacttgtaagtggaagctaaaagataagaactcatgaactcaaagaggggaaccacacagacactggggcctacttgagggtggaggatgggaagagggagaggagcagaaaaaaataactcttgcgtactaggtttagtacctaggtgatgaaataatctgtacaacaaacccccgtgacatgagtcatatgtagcaaacctgcacatgtacacttgaacctaaaagttaaaaaaagaagaaacatcacttctgtagtattcttgccaaaaatgcatactctaattaagaggaaacattagccaaatccaaactgagggccattctacaaaacaaatggccagtgctcttcaaaaatgtcaatgttatgaaagattataaagacagagagcccgggtgcggtggctcatgcctgtaatcacagcacgttgagaggctgaggcagttggatcacttgaggtcaggagtttgagacccagcctgggcaacatggcaaaccctgactctaccaaaaattagctgggcatggtgtcgcacaactgtggtcctagctacccgggaggctgaggtgggaggattgctggagtctaggaagttgaggctgcagtgagccgattgcaccactacactccagcctgggtgacaaagtgaaaccctgtctcaaaaaaacaaaaaagtaaagatggcttgtctgatggtagtgggttatcagaacttattattaataacattagtgtcactaaagttggtatacaaccccctattgctaaatttggctttaaaaaaaaagagaaagaaattgttccagattaatggagagtaaacagacatggatattaaatgtattgcatagtgctaaaagggataacggccagaaaaaaaaatttacataaatgacattgttgggacaattggtaaaatctgaataagaactgcatattaaatataacattgaatcaatcttaaattttctgatttctgattttctggatacataaaacaatatccttgtttttaggaaatacagaaatatttttgggtaaagggacacgatgtctgcaaattactctcaaattgttaagcaaaacataatgtatttgtagtatatatggaaataaaaatataaatgtgataaaatgataataattggtgtaattggtcaatctgggtgaaaaagtatacaggaattttttgtagcattcttgggatttttctgcaaatctgaaattattaaaaacaaaatttttattttaattttattgtcccccaggctggagtgcagtggcaccatctcggctcactgcaacctccacctcccgggtttaagcgattctcctgcctcagcctccctagtagctgggattacaggcgtgagccaccacgcactgctaatttttttgtatttttagtagaaacggggtctcaccatcggtcaggctggtctcaaacttctgacctcaggtgatccgtccacctcggcctcccagagtgttgggattacatgcgtgaaccaccgcatgcggccaaaagacaaaaaaaaatttttttaatcaaatcaccatccaatgtaattccatctccaccatctactacagatgtgatcgtggataaaccataaacctttcataacttctagaaagtaactactaatactattatggtagaaaggatcaatgttaaagcaaaactataaaaataaataaatacgatcacttgaccatggcgccttttcaatgaaataaggggcaaggggcttgggcaaacgaggatgcgtaagatgatctggggtcccttccggatccccaggtcctcgacccccggcatgtaagggtagagtcaaggagggtcttcttaagcgttcctcggcgcggtcctgaagagattaaaggcgtcaaatggaccgctccacacctgagctgccgccaagctaactcaatccgagccggcgcatttgagaaggcgcctgtgagggtcgctcctcagccgccgcgctcccactccgcgtccccactccgcgccgccgcgcctctgccagccccgaaggtggacgtgaagctccaacacctcgacttctgggcccgcctccatggccaggtcccgggactgctggactgggacatggggaacgagctctttctggccttcaccacatctcacctccccttagcggagcagaaacgtgagtagcgggtggggtgaggtggggggctgggcgtggcggagggtggcctaggggctcgcgggaccccggggcagacggctccccagccttcgcccccacctcccggggaggcttggggggccgagcgccccgcgccccccccccccgacggcttagctccgccgcccccgctccacccccactcgcgaactctactcgggagtggtttggggggtgggggggttcgcgcctgactcaattggaagctcccggaggacagctggtctcacctaaaaacggaggctttccactctacgtcacccgccaggctcccagaacattccaaggcctcttctgggtcttctccttggcgctggtcgccatttgctatactgtatatttcagttacttttccgtctcttaaaaaaacaggcctcatcgttttatccatggctgtattctcacctcttaacatattgcctgacacctacaagtgctccgtacttgccaaatgcttagttgaccatcgcgatcttttaggttttctttttcttctttggacgtcaagtgtggagagttgacataattactccccacattcatggtaccttttcgcctgcaagacccttggattaactcttttttttttttccaaattttttttttgagacggagtcttgctctgtcgcccaggctggagtgcagtggcgcgatctcggctcactgcaacctccgcctcccgggttcaaacgattctcccgccccagcctcctgagtagcctggattgcaggggtgcgccaccacgccctgttaattttttttatttttagtagaggcagagtttcaccatgttgtccatgtcggcctcccaaaagtgctgggattacaggcctgagccaccgcccccggccttaactcttccttttgccccttaagtctccacccctccttccattacctctgctgctcccattaccaaccctaatccatttaacgtctgttttctccactcattgtttttgagagctgttgttttaggttgctaaattcagacctgattcattatttctgattgttgttagtattctatcggctgggtgtcccaccttttacattttaattttctttaccctagattgcttccaactctttgccaccataattaatgctaatgaacattctttcttgtttcttcattcaagaaatatgtattgagcacctccaactgacctggcactgttttagacactcatgatacacagtgaatagaacagacaaggaaccttacattctactgggggcagacagataatccacagaagtataataaatgggtagatcatatagtatgctataaagtgataatctgcaatggggaaagaacaggagaaggagactcaggaataggggaagggtgtggtggcagctacagtttgttttttttgtttttgttgttttttgagatggagtctggctctgttgcccacgctgcagtggtgcgatctcctctgccccccgggttcaagtgattctcctgcctcagcctcccgagtagctgggactacaggcacgcgctaccatgcccagctaatttttgtatttttagtaaagacggggattccctgtgttggccaggctagtcttcaattcctgaccatgatccgccgtctcagcctcccaaagtgctagaattacaggtgtgagccaccgcacccggccttcttttttttttttttgtcatggagtctcactctgtcgcccaggctggagtacagtagcgcaatctcagttcactgcaccctctgccacccaggttcaagcgattcttgtgcttcagcctcaccagtagctgggattacaggcatgcatcaccacacccagctaatttttatatttttagtagagacagggtttcaccatgttggccagccaggctggtctcaaactcctggcctcaagtgatccgcttccctcagcctcctaaagtgctgggattacaggtgtgagccaccgcgccaggccacagctacagttttaaataagattgtggggttgaactcaattaggaacataatatttgagcaaatagttgataggaggggtggagtgagcccagaggatacttgaagggaaagtggtaaggtcagtaaggctggatgacagtaaataaagagctccaaagggtgtggttgagagcaggaatgcctgtcctctaaggactttagggttgactttgagtcagatgaggattgattgtaaggttttgtttgagatggactcttgctcttgctcaggctagagtgcagtggcacaattacctccaggctcaagcaatgctcccacctcagtccccaaagtagctgcaaccacaggcacaggccaccacactggctaacttttttactatttgtagagatggggatctccctatgttgcccaggctggtcttgaactcctggactcgagcaatcctcctacctcccaaattgagcagaggagtgacatgctctcagggtctgcttcatgagtgtgtgacccgtgcagttgcctaggtgcctgtgtttggtttaatacactgctgtcactgtcttgaaatttttaataatttttcaacgaggagcctcatgttttctttactggaccctacaaattatgtggctagtcctgcatgatctagatttgaaaagatcactctggctgttgtgttgagagtagactgtggatgtacagagtctaggaggctgcagtagtaatccagacaagagatgatggtagattgggccagggtagtagcagggagaaccagctggctatgctgatggattggatatggcgtataagacagacaattgagtatgagccttcaaagtgttttgacctagtggaaggatagagttgccttgtactgagtgggagacaggtttaggaaggaagatcaggaattctgttctggatatgctgagctggagatccttagacatccaagtagaagcattgagtctgcagttggatacatgagcctggagttctggagagaagtggggactgcagatgtaaattttgggtcttttggtatatgggtggaacttaaggagtaagaatagaggaggaacaagaatgagccctgggggcagtccattgtaaagagattggagagaagagagataactagcaaaaaagactattgagaatcaaaactagggcgtctgtggtatcctggaaaccaagtggaaaaagcctttcaaggagggaggggttggatgagtggaatgtaagtgatgattggacttaacaaagcagaggtccctggttagtggttttagtaagtggtagaacaaaaaacctgactgaagggggtttaagagtagaaggaggggaagtagaggcaatgtgttatgcctcaacaggaaataagatgggataatctttttctttttctttcttcttttttttttttttagagacagggtctctatctggtgcccaggctggactgcagtggcaccagcacagctcactgcagtcttgagcagccttgagcagccttgagcagccttgaactcctcggctcaagtgatcctcctgcctcagctttccaaagcaggctgagattacaagcatgagccactgcacctggtccctaaaatgggagaattaacagcatgtttgcatgctgatgagaatgacccaacaaagacaaaaaattagtgacacaggaaagagaggggaagatttgtggaacaacatccttgaaaaagcatgggggatctgtgccaaagagagacacagacatacaaaggtgctatccttgggtcgcaatgagatcaccagtccattgatcctatcaccttttcactgtttcaatcacttgatatgtccacccttatttaactaacttgaatcccatggtcagatattacgcaggttccctggatcatctgtggctttggagcactttgttggccaaaccacaaccctgactaaatccacctctgccaaacgagtgcgccaaaaccataattcagtggactggtgacctcagtgggatcatagttggggttgagggagttagccagaaagacacgaggtggtgcgtttttatgtggtgcataaatgaggttacggagaggttgcagttgttggtttaggttatgcctgagggagtgtccacagtagagtagaagtcaaactcgctggagaagagttcaataaatagcaaagatcatgtttttgtttttgaagcaaggtctggctttgttgcccaagctggagtgcaatagcgtaagcttggctcactgcaacctcccttttcccgctcaagccatcctcccacttcagcctcctgagtagctgggactacaggctcacgccaccacactcggctagattattatctttgtattttttatagagatggggtttcaccatgttgcccaggctgatttcaaactcctgggcccaagcaatccgcctgcctaagcctcttaaagtgctgggattacaggcatgagccgctgcacctggccagcagccaagatttaaggcaggagtagtgttggagagtgacagctaaaccaggaggtcagtagatggtagtaacaatggagattgattagtatataagttcctgtattaacttgaatatatacatccaggagcagacagtaaggtcgagtaaattgtggtcctgcctgattgctcttaacaagggctgctccagttgatacacagaactgcagtaaaataagagattctgtctctttgcatgtttctcaacacttggtattatctttataattccagtcaatttgattatctcattatcttacagtgtttttcgtattattaataatgctgatcatctcgttagccattcagttatcccctccttgtgaatgctgattcatatcatttgtccatttctaagtttgtgttgaccttttacatattgatttgtaggagctctctatgtatcagagaactgagaaatttggattgaagttttgctattttgtttgtttgtctatttgttttttgcttatggtgatttttactatgttagaacttttttttgagacagagtcttgctgtgtcacctaggctggagtgtagtggcacgatctcagctcactgcaacttctgcctcccaggttcaagtgattctcctgcctcagcctcccaagtagctgggactacaggtacacaccaccaagcccggctaattttttgtacttttagtagagatggggtttcaccttgttggccaggctggtctcaaactcctgacctcaagtgatccacctgcctcggcctcccaaagtgctgggattacaggtgtgggccaccgcacctggccaaactttaatttttgtgctataatatgtgcataaaacttacagattcattttgagggtaactggcatcttaatagtatgtattataagtctttgttcaagtattttaagttctttatttaagagctgagatgggaagattgcttgagttgggaggtggagattgcagtgagccggtgtcacaccactgcactccagcatgggcaaccaagcaagaccctgtctccaaaaaaaccccaatttttctatcttttgctactttttccttttttgaatactatgttgaatattagcaacataataggcatcctctctaattactgagctctccgataagtatatcatttctcaaacaaaagcctagattcatctgtaatataatgacactcatagggacagtgagggggcaaaaatagtttttgtcctgaacaaccattaatggtggtgccacttgctaagacaaagaatacaggaaggccaggcatggtagctcacgcccgtaatcccaacactttgggagcccgaagcaggaggattgcttgaacccaggggttcgagaccagcccaggcaacatagaccctcatctatacaaaaaatacaaaaattgggctgggcgcggtggctcaagcctgtaatcccagcactttgggagggtgaggcaggcagatcatgagtcaggagttcgacaccagcctggccaatatggtgaaaccacgtctctactaaaaaatacaaaaattagccgggtgtggtggcgtgcgcttgtagtcccagcttcttgggaggctgaggcaggagaatcacttgaacctgggaggcagaggttgcagtgagccaagatcgcgccactacactccagcctgggcgacagagcgagactccatctgaaaaaaaaaaaatacaaaaattagtggggtgcagtggcatgtacctgtagttccagctacctgggagactgaggtgggagaatctcttgagcacaccactgcactccagcctgtgcaacagagcaagaccctgtctcaaaaaaaatacaagaatacaggaggaagagcaagaagatggaattcagttttagaagtgcgtttgaagtgcctgtgggctacccaagtaaagacatccagtaggtagttctccttaagggctagcacagaatgctaggctagaggtgaagatttgagagctctacatttttttatagatgttaactgaagccacggacatgcatg

SEQ ID NO: 5682 - DNA, 48002 bp, Homo sapiens
  KRT4 gene - 51486601 - 51494602 of chr12; NCBI Entrez Gene ID: 3851; Build 35; sequence includes 20,000 bases upstream of initiation codon and 20,000 bases downstream of termination codon of the gene
agagcctgggggcagggggagaaggtggcatcctgccccagacagtctcggctcagccccagctctggagcacaggtgataaccgggagggcccctccctcctgcttggggagagggcactccccgtggccctaaggacccctccctctccccttggggcgatggggcaggagtgtctgtggagctggggagccggcccagttgggaaaagataaaaagcccacagtggcccagcagctcacggcactcccttcctgccctctcatcctgccctccggcccctctgcagctatgaggtcctccgtctctcggcaaacatactccacaaaagggggcttcagctccaactctgccagcggagggagtgggtcccaggcccgcaccagcttcagctcagtgacggtgtctcggagcagtggcagtggtggcggggcccactgtggccccggcacaggtggctttggcagccgaagcctctataacttggggggccacaagagtatctctgtcagtgtggccggaggggccttgttggggcgggctctggggggctttggctttggcagcagggcatttatgggacagggggctggcaggcagacgtttgggcctgcttgtcctcctggggggatccaggaggtcactgtcaaccagagcctgctgacccccctccatgtggagattgaccccgagatccagcgagtgcgcactcaggagcgggagcagatcaagaccctcaacaacaagttcgcctccttcatcgacaaggtgggccaagcaggaaggaggaagggagctcttggggaagaagcgggacctctaatagagggtgggctgggccagggctgctgtagcccacttgtactagggtggtggttgatagagctctggagctctcccggtctgagcctgggatgccgagacgtgggtggctggaggcggccttcaggtcttcaccgtgcctgtgcggggggagtctccagtctactcatgagtccggtttgccaagtccaccttgcccgtgttgaagcctgtcctaccaccatgattaatacgattgattgcacagtagccttacctcatcatcaaaaaatggattgtcctcatagctcctcttagtggggtggcctgcattgccttttgtcattttacagctggggaaacaatgctcaggagttgaaagagttgttcaaggctaagagcatggagccctgtttgttccattctttcaggcttggaggaggcttaagggcaagatgtgatcaaaacacagttgtgtgtgggtggggtcctaggggtaggctcccttccgcttctcctttttttacactctgagtgaagaagctcaatttggggtggacaatgaggagggtggtcaccaggtcaccaagctctgggaatgtggaatttgacctgttgcccataggcatgccctgaaccttgcccttgcctccagatggatgggagcaacacttgtgctgggatttcctggtctgtttcgctggcattgtccacctcgatcctgagccaaggcagcgggtcatgatggggaaggtctggcagacaaatgtaccttggttcagtgatttgtgtgtttccgaagaacatgcacatcccttttctcctgaggtacccacagtgcttctatgaagactcagaaatggtgatattgtgcccatttttgagatgagaaaattgaggtctagagagctcaagtgatttgcccaggatgatacaaggagttggaggcagaggcgggactgggacccaggcccctggactctgtggttcttggcactaagagttgttactgctcacaataggcacacctgctgcatgatgctcccagggcatgtgactgaggcccaggtagtgtggagatgggacctggagatattggatgacagaatatgaagcaagccgtcttgcctgcctcctcaccctctcccctagtgacttttggttttcctgtgggactgtcccagaggccaaacaagccaaaacctttctcaggattgcagaatcacagcttgggagctggaggtctgagagattgtcttggaaccccagctgggccaagaactctcgggggtcctgttaaacccacaccgtaagcctccttctgagtctatagaggaagggctcagacattggtactttaaaaaaagttttttttgggaaaaaatgttgaatttacagaaaagttgcaagaatagtacaacatactcctgtatactctttcacccagttcaccaattttcttaatttattattattattttttgagacagggtcttgctctgtttcccagactggagtgcagtggtacagtcatagctcactgcagcctccatctcttgggctcaagtgatcctcccacttcagcctcctgagtagctgggactactggtgcatgccactacacctggctaattgtcttgatttttagtggagacagtcttgctatgttgcctaggctggtcttgaactcctgagctcaagcactcctccagcttcaggctcccaaagtgtgtgattttaaacagttgatttacattttaaacagatgattttaatgcagaattaggggtcagaaacatagatctagtccagtttatgcaggacaagtgagagagggagactcagagagaaatgattcgaccaaggttaccaactagtaaattggtactgctactgagctgggcttttgtgcttattaacttggtagagttctttccatcagattggacggtcgtttccagcagtctattcccctaaggagtgcctccccacagcaaagtgtaggtgcggctgcagcgtccctatgttgccctggccttggaggggaggtggcaatggaccccatccttggctcctctggtgaccggagggtgacatcagcccaccctttctgctctggctcaggtgcggttcctggagcaacagaataaggtgctggagaccaagtgggcactgctgcaggagcagggccagaacttgggtgtcaccaggaacaacctggagcccctctttgaggcctacctgggtagcatgcggagcacgctggacagacttcagagcgagcgggggaggctggactcagagctcaggaacgtgcaggaccttgtggaggacttcaagaacaagtgaggagagcaggccaggcggggccatgtgggagtgaggaggggcagtgggaaacctgccaagagggccaccccattcccagggtcccaggcccacctgggggatgcacagacagagctggctccctcaggtgctcaggtccagcacctgctgccacctggagaattggcaggtttgtttgtaatttaaaaaagtttttaaagtagggggaatagtataatgaaccccatgttcctgtcacccagctttaatcattatcaactcataaccaatcttgttgcattttttacacctccccacttcccttcttcccgtgtagtcttttttttttacctttgcctttttctacgtgttctgattcccttgtagtcttgaagcaaatcccagacatcttgtcatttcattcactaatattttacaagttatattcatatatctgcatgtgaatgtagttcatctatgactcagtaaaacatacagtggcataatcacacctaaaaaattttaaaacaataattcctcaatatcattaaatatccagccagttttgaatttccagtgaccccatacatgtcataaatttaaaaaatacagcttatttgactcaagctccaaaggtttatatattataattggttgatatgcgtatttataacttttaaacacgcacatttaaaaatgacttttcccataaattgaccatggcaatttctaaaccttaaaatctcatcaaaagtggttggggaggagttagctggtttgaatgacactgtgttgttgaaagtgatggtaaaggtcagccactgttgacacatcttcacttgtccctctaaagcctcctaagggcttggatccaaagagatggcagctcttgattgccatattattgcacaaattctgtgcctctttccctaaaatggggtggggagagagaatgtttaaatcaaggcagaccccatgtttcttcactggttggctacattaaagaactgctccccagaggtgttcttgatcagtgagggacccatcagggcttctgtaaggctgagtgggtcccatgcctgaaaggcagagccaggctgagcctggcctgagtctcccatgtgtaacaggtacgaggatgaaatcaacaagcacactgctgcagagaacgagtttgtggtgctcaagaaggtgagccgagtggagtgggggaggtggtcctttggctgccagggtactgggctgattcggggagaggggacatccctggggcctgaggatctgtcttgctctctcgtccccaggatgtggatgcagcatacatgggccggatggatctgcatggcaaagtgggcaccttgacccaggagattgacttcctgcagcaactctatgaaatggtgaggtggccaatgggcagggagagtttgcatacactataaacagcactgggcgttttccatggaggtctgacctgaattcaccagtgcaacctcattggtggaagatgaaaccttaacacttttttttttgagacggagtttcgctgtgttacccaggctggagtgtagtggcacagtcttggctcactgcaacctctgcaaagcgattctcctgctttagccactggagtagctgggactacaggtgcctgccaccatgcccagctaatttttgtatttttagtagagatggagttttgccatgttggccaggctggtcttgaactcctgacctcaggtgatccacccgccttggcctcccaaagtgctgggattacaggcgtgagccaccgcacccagcctaaaaccttgacactttaattaatactagcttcaacttattaagtgcttttgatgggccaggcacgggggcaaacttttaacataatcttctcaataaccccagaatgcaagaactattattgtctcaattttatagtcaaggaccctggggctcagagttgctcgtggtcacatagctaggaagaagcatgctagaattcaaatctggctcttgaactccgaagtctgactcttaccactgttatattgccctcttcctgcccggtttgtaatggagcaagggatgagggagcaggaatgggcagagaggagggactgggattccagattggagtagaaggtgaggcgtgggtagattaaagaatccaggaggggttccaggagacaagagggctttggagactagagtgagagggttgaacttaacatgaattgaccgcagaatcacagactcttagggtccgcagggacctcaagaccaaccttccatccagtgcaagaacaatttctatgatatccctgacataaccctatcatatgtaacctctactcaaatacttcctgtggcagtgagctcactactttttagggcaggcattaccattgttgaacaacttcattagagcactgacttgaatctccttctcatgacttctgcccttgactttgcccaattgtcttcttgtgacttatgcctttcacatgatagccctttagaagtcatgatgatgacaggataaaaatctgtggcatgtgaggacgttcaggaaacagggcttttagtgaagtattcagaagatggaggggtggggagggaggttccagatacaaacttctattgatgcagcctaatagtgcactagtttatgtgttgttttagaagttgtttcacaacgttggctttcttagaaccccttctggactttttcacataaatgctttcaaatgagacatgtatctactctcctccaacttcctgtatgtgggtagctgaattttgcaattgagtggaacagttaaccattccctttctttcctatgaaatgccactgtggtgtcatcccaacattttaagctatgtgggctcttagtaacttgattcttttatccagtgtattagtgatgcatagctttgtgttatctgcaggtgggataaactttcagtctaggtatttgatagcatctcagtgtaaatcattgatacacatgttaaggcaatcagggcctaaaacaaagtcctgtgggtcttcagtggtgattttccaagggactgttagtctgttaaccaataatttgtggttaaagagcctcagctactttaaaatccccttaacagtactgttaccaggatcacatttttctgtcttctttcaagaatgctatggaaggcttggtcagacattgtctatggcaggcctttagcagtttaatattataatcatgaaggaaaatgaaatccacttggttccacttttccttagggaacccatgatggcttcatgcctctcacacacatttaggaattcattctatgggtctggaggaggttgatgtcagccttatttgaaaaattccaaatctctcccatttgaaaatcaggccatttgctgcgtttggggttttggggtctcctcctctccatatctctcaaggatgaccagggcgttccttcccttggcagtccctggagcctctgagtgtatgcttttctagcctggatccctgtgatctccaacaaggccaaggtctctcatctaccctgtcttgggttcccatttcctctcaagcatatttcttgtgctttccactttgatgaccagtttgttcttgatggaaaagaggcaaatgacaaagcagctgagcgattggcctttcctggatcttctgtagggatcagcccaaagggacctccgtgttatttctgcctagagttcatctagcagcctctgacccctggctttggtgtttcccgggcttatccttggctggattgcttgccttccagcatctctgcacggcctgtctggatggaacttactgggaagttttctgggctgccatgctgagtttttaggtgcttccccagtttctactttgccagggtcattgatagtcattcatggtctggggcctccttgtggtccattaggttccattctctctccccctcttttctgaatgtttaggaattggcttttctttggtctaaggacatggctggcatactcagcattcctttccattgctatgccttgtttatttaacaaacatttactgagcaccttccacatagcaacaaagacaaagtctcagctcttgtggggccaggttatcaagtgatgagagctgtgggggacaggcacaggtgcaaaggcacatgggacgccatggctgacccttcctgggagggctgcggaagccttcgagggaggtgacttctgagttggatcttgatggaagggctagacttctagaggaggagcaggaaggacttggcagcctggggcccagcctgtgcagtgtcatggaggcatgaaggaacatggtgcttggggaccagtgggtggtgagtgcccacatcgagtgtgtgggcacagttaggtgagcaggaggcaagggaaagagtggtagggaccaagcctgggccctttcctgtcagaggtcctcacggcccagcagtgcctccgtggggtgagaacaaggatcagcacaattgttctgttgctgcctcatgggctcgatcagtcacggaaccagcatggctctcagtaaccaatgccatgatctggttttggccaagccagatcccacggcaatctgggggatgaaccacctatcactgggtgtctcatagggcaggaaggcagcctccatggtggcctccctctggcctggggcatctgtggaacccagtccctcttccgcttgtgccacttctgcccgctggctccctttacccttgcctagaagtctccactgtctttcccccttagagtccctggtgtctaaggagacacacaccttagcgattcacagagctctttctgctctgatttcacgagctccctttcatcggaaagcctgactttttttttttttttttttgagacagggtctcattctgtcactcatgctggagggcagtggcgcaatcacagctcactacagtctcgacctcctgggctcaagcgatcctcccacctcagcctcccaagtagctgggattacaggcgcacgtcaccatgcctggctaatttttgtattttttgtagcgacagcattcaccattttccccaggctagccttgaactcccaaaatgctgggattacaggtgtgagccactgcacctggccaagcctgacctttctatccccttgttccagcaagaccattgcatcacctcatccactcttgatgccatccagtggagagattttgcctccttgtcttaaaagtttcgggttgattttcctgaggactatgctctgacatggggctagagaccctgagctaaggagggcaggggcaggatgcgtcaagatgatgctgacagttcatctcggtggggaaggagacaaagcagctgtgacaacacaatcttatctgtgacaaatagaccttatgggcacctccagtggccttcagagaagtctgggaaagtaagaatgcactttactcagcacatgccatgggtcatacatggatcttaagccccacaaccaccacaggaagaaagtatgatcaggccgtgttacagaagagggaactgaggcatcgcaaggctcagctgctacatcagctacacagccagtgcgtgttaggctggggacttgatctcaggcttgtctatctccaaaactcatatcttcccaaaaaccacaagtttttgtagtgactagattgattgcatctctaaactcctcatcccactttttgaaagacaatctaatttaacaatctacatctacatcagtatggatatcagttttgcctttggtatttctcttttccccctgtctctctttgttcctgcctatctctattttagtctacgtcctctcagcttctgatgtcagactcctggggtttgaaactgagctcctcacttactggcttgtgatctgggccaagttacttaatctctttgtgctactggaaaagggcatgtaatgagttagtacctgccacatgcctaacacagagcctgaatcacagtgatgctcagcatgcgagggttgttattattattctattataattccctgggctgccatgaagggccagtgtttgagaaaggatggagacaagaccaggatatgggaggtgttgggttttagggggaaggttctccacctatcagggagcctctgaggactactgagtgaatgagtgatttgtcagagctggagtttagggcattctatgggcagcccagagcaggaaggaccatgggagagatggaggcagagccccacgtgggagccatcacagtcctggcccagcgatcccactggtcccaaggccagaacagagacctttgattccccatcacctaacccgccattcacagcatcctgaagcctacttatgtgtgaaggacgatggttctagaaacaggagggcccaagaacatcaagacagtctatacttttcagtgtgctctagaggaaaccacttgggctttgtggtgcaattgactggtcccaggctgggtcccaccctggacctggtgcccttggatgcatcacttctcctctccaaacctctttcctcacttgtccatggtcaggactactgtggatggtggtgcagttggtgacttggctggtgctggacatgctgtttccacctgaaggggtgtctttccccaatttgcacaaaggcaccctgtgagcctgccatgggcctgccagctgcacagggtgttctgaggcctagaggggttagtgaatgtgctagcacagtgccgggcaccagtgttagtgcagagagtacacattctctttaccctctctaatcttttggaagcctgcaaacccataaaaataaatgaagtctgtaaaaatgggagcttcattttatagctggggagactgaggcctttccttgcagttttccttactttgctctaggctggagcctggacaagagcacaggcctcctgatgctacctgggggcccatgtccttcaccctctgatgcttcctggggcctggagcaggggtgctggtggcagctgtctctgattcttcaggagctgagccaagtgcagacccacgtgtctaacaccaatgtggtgctgtccatggacaacaaccgcaacctggacctggacagcatcatcgccgaggtcaaggcccagtatgagctgattgcccagaggagccgggctgaggccgaggcctggtaccagaccaaggtgagaggcatagctggctcaggtgtgaggcctggggtcggatcagatctcccatcgtgagaggcttgggcctctgggacccttggagtccggggggccagatatactcaacttgcatggggcctccagctgtgagggtgggctggggccatttgaaagcgcactgccacttctttggtccccagtatgaggagctgcaggtgactgctgggaagcatggggacaacctgcgggacaccaagaacgagattgctgagctcacccgcactatccagaggctgcagggggaggctgatgcagccaagaagcaggtgggactctactgggggcttgggggtctggcctaggtgttggcagggccttctcattgtcaccccgaggggctaggcctgctcttctcctgacggacacaatagaatgctaggccattgatcacaggctccttttacatggggggaaactgaggcacagagcaggaaggagcttgtccaacgtcacatggtatatgagtggtagagcaggtgggacaaccttctccaaggaaactgatccatcccatctccaggaagtcagaacaggaggtagagggttcaaggggccaggtcacagatgctgatgccgactccacctttagaacggctaaaaagtgtgggttctttcacagattagaatgaagcacctggttactaataaggctgtgttatttatttcatctcttctgaggcattgggctgatctgcagcaggaggggttgaggttagacttcagtaaggactttcccagtggccttacttgatcctgcttgtgtaatagcatctcttcagatgaatatttctcttctctctttcccagctggttgggggcagggatgtgggaatgatgatgtctccatggcttgagggcagagagatgaatgggatgaccccggagggtgcttccaacacctttctcccctgggcagtgtcagcagctgcagacggccattgcggaagcggagcagcgtggggagctggcactcaaggatgctcagaagaagcttggggatctggatgtggccctgcaccaggccaaggaggacctgacacggctgctgcgtgactaccaggagctgatgaatgtcaagctggccctggacgtggagattgccacctaccgcaagcttctggagagcgaggagagcaggtggtggcccctcctgcccgacccagaaagctgggtcgggcctgccctgggggagagcccagggagtctgctccggggtcaagagagggagagaggaaccagggagcaagatcctgactcacgcggggggaaaatctgcttgtgcccactgcctccatcactcctctccttggttggcacaactcttgttaatctttactgtggctgacagcccggtaggaatggaacttcctcttccaccagcagatttcaccagcagtggaagctttggaaaaaaaaatccaccatctctgtccttaggaaaagcatgaaatagaaagtgggcagaaactaggcagctctgtctggtcgtgggcttgtttccattggggcagggatgctgtccgtagcccacatgggcagagaggaaagaaaaggggaggatgggagttggcacagcctactggtggctctgccctttctgcagcactggcttttggacctgggcacagccctatacacatacttctcatgtttcctggtcttgtcatcaggattcactgagtggatccaatgtaaaggcagagggaaggagagggttttcatgtgggcaccagggataactgactgctctcctggcctttctgtgtcccctaggatgtctggagaatgtcccagtgcagtcagcatttgtgagtatttactccccacttcctgctccacccctggccaggccccagaactctgctcagtttatgcaacctgtacctgtcctaaagcatgctctcctccattcgagcccctggagacaggttcagagggtcctagttctgggcttctctatccatttcccatagctctgctgcttgattttgttctgattccccactgatttctgggtctcccccagccctctctggcatggccgccctgactaatccagaccctttgctttgcagctgtgactggcaactccaccactgtgtgcggaggtggcgcagccagctttggaggtggcatctccctgggtgggagtgggggggccaccaagggtggattcagcacaaatgtgggctatagcaccgtcaagggagggccagtctctgcgggcacctccatcctgcggaagaccactacggtcaagacgtccagccagaggtattagctgctgagccctgcaagggcccctgcaatcctgtccctgccctcctcaccccacctctgctgtcctttccagtcacttctcaggagcaggaacagccaggggacctcagacccagggtattttcataccagactatttgcatcttgggaagcgctcaaatctactcaggttttctccttggtcctgcagtaggatgggagggaaggttaaagttgccagcttgagtgatgtgcttgggtgacttgggggtgaccttttgaccaccgagaggaggctgaatttctcaagccattaggagagagagaaattgggagtggtccccaaagacccttcaacctccccagtcccccaccagacccaccctctccctgaatctacccacatcccccttccctgtctgtgtctcaataaatggtgcaactgcagctagctgtctgtggctgcagtctgtcctgcctggggaactgaaattgtgtccattgattaacatcctgatgcctgacacagcaataatcacacactcaccacatcccaatcgccatgcttacttaggtacattagtttgataccatcgccactccagggctgtacatggctcacaagaggagaccaaggctcagagggaatatgtaagctgctcaaggccagacctggctaagtggctgcctattaaccagccacccctggtgcctgttcagcctcccactaactctgtaggggcagacagcatgctttgttcagtggagaggtcttaggcttcagaactaggcaacttgggtttaaatccaagttctgccacttactagctgtatgacctcggtcaagttacctaacctctctgagccttagtttcctcctttgtaaaagtgggttgtgataagaacatgtgtaaagcatctggcttatagaggccctttcaggaatcaggtttctttgctttcccactccctgacttctggattcccagcttatcctcttggcctcagtgatgtctctctcagcccccacatccagtcggcaagaaaaatccacacttaattgggttttgtggtttacacatacattactttgcctgtgaccatcaccacagccctaggttcagtagtgggcatgtggtgttccagtttacaggtgaggcgattcacgctcacagaagtgacctctcatgctgtagtcatccagctggctggaggtgggtcagtagtgtccagggctgcaatttcaagccctctgtcctgtcaccccagaagctacctccgtcctactcctgcctccatcactcgccaaatcttactgctcctccctccatgcgtctcttggtatcaccttctttcctcttcatctccacagttctctactttgagtctggaccccactcctcaagctgtacccaagtgattccccaattggctggcctctcaaccctgcacctctcaggccctccccaccctgctaccaaaccagttggcccgacccgaggctgtcaccactccgctcccttccttggcaaccttagggctcctggcagttgctgggatgcatcccacactcttccggcctgatcactctgtcctcctcagaggagccccgaagagccctgagaaagcttcctccagggctgtggaaggccagcagagggattttcagccaaaccctaacctccagcttaggaacacaaaggcctagcggtttagggtcagctctgcctcaccagcttgggtggtctctagcttcccttctcagacagatggagtatagtccaccccatgtacaacactttgaggaatacttgctaatgctcactgagtgccaactgtgtgccagaactgctgtcaagcctttaactgattctcttcacaacagcctataatataaatactattatcattctaattttgcctataaggaaaataaggcacagagtggttaagtaacttgcctaaggtcacacagctaggaagtagcagagctaggtgtggaatccaagcaatctggttccatagcccaagctcttaagcaccaggttattttgcttatatagaaaaaggaatggagacctggggatgctggagctagaaggggcattggatgtaatcgactccaaactttttatttcatagataagaaaacaggttgaggaaggggaagaatgtatccaaagccacggtaacttagtggcagtgttaaaaaaaaaatcagttttagtgagatcataggccaggtgttgtggctcctgcctgtaattccagcactttgggaggctgaggcaggtggatcacttgagcccaggagttcaagacaagcctggcaacatggtgagactctgcctctacaaaaaaatacaaaaattagctgggtttgataatgcatacctgtagtcccagctacttgggaggctgaggtgggaggatcacttgaggctgttgaggctgcggtgagctgtgattgcaccattgcactccagcctgggtgacagagggagaccctgtctcaaaaaaattatatttagggctcaaaaactgaacaatagaaacttttgattgtcatggaaaaaagcctcagagattatactgcagcccaggggggcccaccaacaataatgcgctgcttagacatacttgtcgaaggaggggaatggcccagacccaggggtttccaaactgaggaccctaagggctgctttcaggggtgcagggggaggtcagcaggtgagaaggatcatggtccctcctctgcaccaactggatcatctctccttatctgttttactcatgaggctgtgcacgtgattttgtttatgagggtgcttttgctgccagaacatgctgggaagcccctgcctgtatatgcctggggtaggaggccagcaggggcagctctccggcccggggaaagaggagcccctgggtacagacccccatacctggctctcaggagtgcccgtcctctcattgccctcactggcctctccctaaaacgctgatggcccttttctgcagaatctctgatccccgtgttgtctctggttccccaagaatgactcaggcccggtggggcagttgaggttgggtgaccgaatggagtgagggtgcccgcctggccagggagggcaggagcactttcccacaccacacagtgggtttggagatgagagtgacagaagccctcaggatcccttaatcccagggctgaatgtaagggcttgcctcccttacccagaaagccctgagcaaacactccctccgcctggctccacacccctgtcggctgctcatccctctgtgaaaagattgggaacagctgccaaacaaggaagggtcaccgagggcagtagcagaatctgcgtgtggaggtctggggaggggcaggggacaagcttccagctgtggctgctgggtagtggcgccttgttcagccacctgcctctggcccacatatgaaggcaatgtctttccccgttttcagggaaagaaactcatctctctttctctctcactctagggtgtaaaggcgctcttgcataggaagttcttccttaggtctaccttcggtttctcaggctcagtttgaagattttgtgagcttcttgcaattctgatttaataataaggacacagaatgtggctctagactagaactttcttcttgtttggattgggtttatggtagggtttgtcatgaaattaatttggatttagttaattggaggatacaaaactggcccctcaggacagtgtcataccttattgggtacttgtaaggacagggccacatcaaccaagcaactgaccatgtgctgagggtaaggacaaaaaggagcggagctgcatctgcagagcttgcagcctgctggccagaccccatggctgtcttggtggaccatgaggtacagggctgtataagttgctgtgtatttttttccctgcatattctgtgtgggccagtcactcatataaaacattatacctaccgttttatacattgtaaggtcacaagctttgaagtcagacagatagtactgacttcctatctctaccacttcctggctgtgtgatctcaggcaagttacatacccctctgagcctcaatatctgcagctccaaactggacatagcaaagcacctctttgactgggttgttggaagaagcacctagtgttcagcatataacagtagttccaagagagaatcccttctacccaagaggcaccgctgcctttccttcatcttccttcttgtatcagcgatggcacacctcaagtcaccttcatgagaagtacctcaatcgtagctccatggtttgggtgccccacaggcacaaaataagactgattacatattctatattgtttccctgaaaatccccttggctcctggcttgctttttgttctaagcagtagacacaactctaggggcagtgaacccatgccattttctcctagtgttggagtgttacagccatagagtaaaagacccaataagcacactatgagccatctcagggattcacttgtgctcaggcaaagcctaccccggcctgtgatagtccccatcaaatcccaggggctaccagagaagaaagcagtgaacggcaggtgcagaggctgaggtgaggcagccggggggtgagctccagccatcactcagggtgagatcctgatggccctgccatgtcctctggggcaggtaaccagtcaattggacctcagcttcccaagtgggaggctcacatgtctcctcagctcctgcagctgcagcccgcaaagacctgcagtagctcccaccctccttccaagccatgcccaccttaggagcaacagtggaaatcgatagaccctgggatgctagtgcccccagagcccctttgacccgaacagtcagttccatcagatttatttgggtgcacattctggattggttgtgacacaatttagacagagtggctttataccaggcagaacagtgtgagtgagaggctatagaatatggagcctttgggccaggtgcagtggcttacgcctgtaatccctgcactttgggaggccgaggcgggcagatcacgaggtcaggagatggagaccacggtgaaaccccgtctctactaaaaatacaaaaaaaaaaaaaaaaaaaattagctgggcgcggtggcgggcgcctgtagtcccagctacttgggaggctgaggcaggagaatggcgtgaacccaggaggcggagcttgcagtgagccgagatggcgccactgctctccagcctgggcgacagagtgagactccgtctcaaaaaaacaaaaacaaaacccaaaacaaaaaccaaaaaaaaaaaaaaagaatatggaacttttgggaccagactgatgtaagtttaaatcctggctccaccacgtgctgctgtgtgaccctgggagctactttacttctctgagtttctgtaaggaaggctaatggtgctgactccatagagcctctaagtagactagttgatcaaatgtaggtaaagcatccagcacagagcttggcacgaagtcggcgcttggtgaatctgggcagaaaggatcagtgaaagtccaaccccttccttctaggagatggttctggctctagaatgctcacctactgcaggtggactgacccatgacgcgggcattctcctgtgatggggcctggggcctccagtcctcatggccacagcccctccaccccctctccacttacttagaggccatcttggcagagacagacccgaggtaggggagggaggggttgggggaatggggacaagggaggaagtggctggagaaggagctggctgaactcccagccagcctggccttccctgcagccctgcgtctggggtgggatctcctgaccactctgtcctcagcactggcccctgccctctctctgtgcatggaggcagccgttcactctctccctggccagctttcattcagctaggggcagcttgggtctgtgggattatccaggtgctggtgactgctcttcctcagacctggggtcatttcatctatgaggaattgaggaaaggagggagaacaaacacaccagatttctccctgtaaatggcaatggcaaagcctgggaaagaagagaatgaatgcctgctgacctcctatatgccaggcaccatggggacattgtctaattccttgtgaggcaggtgtcccatttggtagatgagaagatggattggatggtgtattaggccattattacgctgctgataaagacatacctgagtctgagcaatttacaaaagaaagagatttattggacttaacagttccatgtggctggggaggcctcgcaatcatggcagaaagcaaaaggcacttgttacatggtggtggcaagagagagaatgaaagccaagcaaaatgggtttttccttattaaacatcagatctcgtgagacttattcactaccacaagaacagtatgggggaaaccgcccccataattcaatcatctcccaccggggccctcccacaatgtgtgggaaatatgggagtacaattcaagatgagatttgggtggggacacagagccaaaccatattggatgggtttagagtgcttagttggcccacccaaggttatacagctagttagtggcaacaggagggatttgaacacagatctgttactgttcagttgggaagaatttaagttatggcttaaaactaggattttgcatttaaaaacattgctctgagaagggatccataggtttcatcattctgccaaagggatccccagcagcaaaaaagttatgaactcctgccctgaattctgcaccattacagaaaaccagaacacacctagcaaacaactggacagcaaatggagcagcagagtgcacaccaccagaccccgctggagaacgcccatctagaattgtgcaagcacagattgaagggaggcctgcggggcagcatgggtacccagggctgagaaagacagtcacggttttctttggggaggtgttttgtcttcccccatctccttagtacctagctccatgcctggcagtttctcagtagctgttggccaagttgaagtgaatctggatctaggttggaaggctaaggctggaatacagaatatttcccctttttataggtacatggagccaagaacatgtggaggaataagaatgctaagaatgacaaatatacatgtggcttttgacagtttacagagcactccattaatcactagctcactctatcctgagaagtggcaaggcaaatatttgtattacttccaatttacagggaaagcaactgggcctcagagggtgacttgctccggtttgcagagctaggaggtggcaggctgtgcgctcaaactcaggctgtctaactccacattctgtggggtgagaggatgggtgatggggtgtcttttctggaggagggaggtgctgtgagcctagcgagatggaggtacagtgggtgtgggcctggagcgctgggcccaggcaggggcttctgattaggaagccctggggcaccagttcaggttctcccagagagtagtgtgatgggatccagtaacctgtgccctccagatgacttctgtaggtgtgtttagtgacatgctcaacgggtgcgggaaggatgggcttgtgccaagggccaagcccagagatgtttcagatttttccctttatgcccctgcaaccaagccctgctgctccaggacatataagagacgaaggctgagggctccagcactcaccggcctgggccctgtcacttctctgatagctcccagctcgctctctgcagccatgattgccagacagcagtgtgtccgaggcgggccccggggcttcagctgtggctcggccattgtaggcggtggcaagagaggtgccttcagctcagtctccatgtctggaggtgctggccgatgctcttctgggggatttggcagcagaagcctctacaacctcagggggaacaaaagcatctccatgagtgtggctgggtcacgacaaggtgcctgctttgggggtgctggaggctttggcactggtggctttggtggtggatttgggggctccttcagtggtaagggtggccctggcttccccgtctgccccgctgggggaattcaggaggtcaccatcaaccagagcttgctcacccccctccacgtggagattgaccctgagatccagaaagtccggacggaagagcgcgaacagatcaagctcctcaacaacaagtttgcctccttcatcgacaaggtgagctgtgtcctcggctggagaggggcagttagaagagaggggtcctgagtcctggggtctcagacctgagcctgccacaggtgctggggagaccactgaacttccctgggccccaattctccagctgttgaaggggcatcatgactttgagccttcctttttgtcccgtggctggtgggaaggtgggatgctcaaggcagttaagtgtttggaattccctagacaggctgtgggatactggacaaatcatttggcttttctggctctagtcatcccagctataaagggggttcattatttctctgctttttctcagattttggttttgaatataatgcagttaaccccattaatcacttaacagtggccacttctgttcttagaacagaagacaactaagctgattttgcaaatgaaaaagggactggctccagtggcagattctaggtctcaccaaggccttggaaatttacttttttcattcctttgactggacaacactgctcatgtctgggtctgtttgaagaaaggagacaggtctcttttctttttgtagcccaacttcctttttcatgcaacgtctagaagttcaagttctttaagctcagttatggtcatgcatgatggatgatagtgagcagtgcagccccagagagccgagtcatccaaagattgatgactgggtggatgagtgcctccctttggtccaggttgccctggttcaccaggcatcaaagtcttgggcagcttcgacatatggggcaagaatgaacacttttggaatagaataaggtgcatatttgttcttcttgctagtttgaataaacccatagtaacttaaagaggttttactgtgactataggacatgcagatgtgatagcaaaaactcagggctctttgatgcatccttgtctcatctcatctcattttaccttttgggttcaaaatgtgatcggtctgccttacctgctttcctttcaattctgaggctcataacatggaaatgtcatgctaagctgctgtcctggtttgtctggctagattttttcatagagagagggaaagttcaggaaagtcctttgcagaatggagtttaggtgagacaatgcgtacagggcccttgttttaaatatctatactcagttgttcacaggttcacagggacacgccagatccattgataagtaagcttatttaaaaagtctgtagtgactttgtctttcatttgccttgggtcaggatcactttgaatgcaagagcctccagattgtgatgtctcttaattttattttgttatttcatagaagtttaatgttctttggggctttgggtgcctgcggctaggaagttgttcttgttgcactgttaggccctgcttctctggctgtgctctattctccacaacctatgtgaccccttggtgctatgggctcgagaatggggccatcatgtcaacccgagtgaatggtgccctggagatgcaacatagtggccctacttgggtggttcttgggccgtgtagttccctgggattgactgggttggtgttgccttggctggccctcctgccacacttcaggccctcatcacttggctggtgcctttatcaacacaggtgcagttcttagagcaacagaataaggtcctggagaccaaatggaacctgctccagcagcagacgaccaccacctccagcaaaaaccttgagcccctctttgagacctacctcagtgtcctgaggaagcagctagataccttgggcaatgacaaagggcgcctgcagtctgagctgaagaccatgcaggacagcgtggaggacttcaagactaagtacatggggaggaaggaggggacgccatctgacacatgtgcccagccacacccaggctcccggggctctctccagtggcttagaatctcaggctctgaaggcgtctaggaaggccctctagtctgttttgctacatccacatagtcacgttttctcagggtgaggtctggtaaccacagatttttccgaaaggaaatttaatgatagattcagggatttgggtctgccatatacgaacaagatcagaacccaaatagatgaaaagcagtatagtatgattagaagaatacagactgtagagacagatggaggtggtttgcatactgagtcctcacttactagctgtgtgaccttgggtaaatagctgaacctctctgagcttcagttttattcatctttgaaatggggataatattcctactttatgggttgtgagaattaaatggaattaaatgaaatagagaaagcatgtggcatatttcaggacacagagtgaacactgaatacacagcacctctcattaaactcactatgggataggactgacaaaataaataccaaccctgtctctcaattcactcacccaccaaacaaagggaaatggagtgtgctgatgacattgctgagaatttaatctgccaaaatggccaaaaggacagccctttcagggacattaaatcaactacatcattgctgggttttctatcgaaaacagtctctttaaagtttggttttcatgtatctgaataaaccctggcctaaacgggtacttcctatattcaatgaatataggttaaatgaatatctgtatgaatatgggaaatgcaactaattacgtggatatttccaaatttgtttggaaatgcttgaaaacaagcagcagagatctgagaaacaccagctcactgtgggtttttgtctttttctccccgtgcccacccccaggtatgaagaggagatcaacaaacgcacagcagccgagaatgactttgtggtcctaaagaaggtaagagacgaaggatggtagggagtgccttcagggtgccccttcccttggggagtggtctttggctgaagtcatgggtttggtccatctctgcctcatccctgcttcacttggaactatctagatctatatagtcaaggaaagtgggtaaccaaaccaggttctaagaaattaaggttgggaggaaagcctatttgcttttttttttgagatggagcttcactctttttgcccaggctgcagtgcaatggcgcgatcttgggtcactgcaagctccacctactgggttcaagcgattctcctgcctcagcctcccgagtagctgggattacaggcatgcaccaccacgcctggctaattttgtatttttagtagagacagggtttttccatgttggtcaggctggtctcaaactcctgacctcaggtcatccgcctgcctcagcctcccaaagtgctggggttacagttgtgagccaccgcacccagctgatttttatttttataaattcatggggtacaagtgtaattttgttacgtggatagtttgtgttgtggtgaagtcagggcttttagagtatccattgctgggataacatacattatatccaataagtaatttctcattatccagcccctcccagccctccctttttcaagtctccattgtctatcattccatgctctatgtccacatgtacacatgatttagctcccacttataagtgaggacatgtgttatttgtctttctgtgcctgagttgtttcacttaagataatggcctccagttccatccacattgctgcaaaaagacataatttcattctctttttatggctgagtagtattctattgtgtatatgtatcatattttctttatccaatcatctgttgatggacacttaggttgatttggtatctttgctattgtgaattgtgctgcgataaacatgagtgcaggtatccttttgttacaatgatttcttttcctttgagtggaattccagcactgggattgctggatccaatggtagttctatttttagttctttgagagatctccatactgttagaatagcctatttggataatcaacttccatgtcttcaggtggctctagggaagaatatataaaataattggtctcccaccagctcccctgctgctgagtagtctttcctaaatgctgctgagaacacctgtcggtgtcacttagtaacccgtcctcctactggcattcctgctcctcatctcttatcctccttactcctctgcaggacgtggatgctgcctacctgaacaaggtggagttggaggccaaggtggacagtcttaatgacgagatcaacttcctgaaggtcctctatgatgcggtgagggctccatcctcccctccatccagggaaagggaatcccccatctgtgacgctgctggttgggattcacagttttttgaaaggactccagctcccttattttagggcagtgggttctcatcaaggtcatgcatagaaaggtttgaagtgggaaattcaactgggagattcttagaaccagatgtggtcttggtcttagacggggtgattagatctaaagagtgcttggaatagaattcattgctgtctagcattttttttctggtgaaatggatccattcccttcccttccattccaacacaccggcactcactgcattagagtggcttatggttcctggggaccagtaaagactagaagcattgctcttccatcctgaactgtcacaaccacttgatttctccttagaactttacctgtctctccccttcctacacattgtgaatgccagctctgctcctacttgagcctgtatcaggtcagtgaaggctttcctgggggggctgatgtgagacatttgccctgcaggagctgtcccagatgcagacccatgtcagcgacacgtccgtggtcctttccatggacaacaaccgcaacctggacctggacagcattattgccgaggtccgtgcccagtacgaggagattgcccagaggagcaaggctgaggctgaagccctgtaccagaccaaggtgggtggtatggatctctcaggagatggggctggctctggggctctgcttttgatgtctgtgaacaggtgatcattagctcaagcccaatagaagtcagatatgaacagactctcccaggcatcgttggtcctggtctgatttgaaactacttgacatttggtgctattcttgccacctgtggcaattctcactgagttcacttgagaatggaccctacccaaatgcccctaacacctggttctctgtgtcttcttgagtcttaggtccagcagctccagatctcggttgaccaacatggtgacaacctgaagaacaccaagagtgaaattgcagagctcaacaggatgatccagaggctgcgggcagagatcgagaacatcaagaagcaggtgggtgtcactcccttccagatggagcacaaggccaggggcctcaggcagacatctccagagtggacaagcagataaagcatcaggccagaagaccctgagcttgttgctgggaattcatagctctttgtgcaaggcatacccagattttttcagcaatatcctagttggcacaccatgacgctcctgtgcataggtttcttggctcttcttcatgggtttttgctcatttttatttaatcagtctggtggaggcattggtgggctatggctggagtgaatgagatgcataagtctcagggaaagtgggcagaacagatagaatcttgacatcctaacccaaggaaagctggaccaggggaggggacaggtgtagaggccttgaaggcagggcactgctgaccacctatctaatgcctttgtcaatagtgccagactcttcaggtatccgtggctgatgcagagcagcgaggtgagaatgcccttaaagatgcccacagcaagcgcgtagagctggaggctgccctgcagcaggccaaggaggagctggcacgaatgctgcgtgagtaccaggagctcatgagtgtgaagctggccttggacatcgagatcgccacctaccgcaaactgctggagggcgaggagtacaggtgaggggttaggcagggtgtgaacatgagggccagagaggtccagggccatgagcttatttatgcctctgccgggctgcaagcatcagtgttgtgccggtgcattacgaaccaggacagctcagctaataggttcacactgggccctcaaactcagaggctgctcaaggataagagaggtgagtgaggcatgcttattgaacaaaattctgtgctccctgaggctcaccgccttttctttcccctacagaatgtctggagaatgccagagtgccgtgagcatctgtaagtaccttccacgcctgctgtagttgttcattcacccgggtcttgccagacccctggggtgctggcagcattggaataactgtgtcttttgtgtcttttctgcagctgtggtcagcggtagcaccagcactggaggcatcagcggaggattaggaagtggctccgggtttggcctgagtagtggctttggctccggctctggaagtggctttgggtttggtggcagtgtctctggcagttccagcagcaagatcatctctaccaccaccctgaacaagagacgatagaggagacgaggtccctgcagctcactgtgtccagctgggcccagcactggtgtctctgtgcttccttcacttcacctccatcctctgtctctggggctcatcttactagtatcccctccactatcccatgggctctctctgccccaggatgatcttctgtgctgggacagggactctgcctcttggagtttggtagctacttcttgatttgggcctggtgacccacctggaatgggaaggatgtcagctgacctctcacctcccatggacagagaagaaaatgaccaggagtgtcatctccagaattattggggtcacatatgtcccttcccagtccaatgccatctcccactagatcctgtattatccatctacatcagaaccaaactacttctccaacacccggcagcacttggccctgcaagcttaggatgagaaccacttagtgtcccattctactcctctcattccctcttatccatctgcaggtgaatcttcaataaaatgcttttgtcattcattctgagcaatggtcttttttccctggggagaggtctctagaatcctgtataactagataattttggtgaaggtgtatgcttgcgggtgtgaaggatctgtttatacagatctgggtcatcgactagtttctcaggtctctacttctaagttactcaaattattgggggagaagtacagtgtacagaggctgaaggttgcctacagggcagttgtacagattgaaggggcatccaacaattatacacacattgtccattgtagggcaccctggggtagcaccatttcaatgctgatcctggaataaacctggagggaaggggtttaagtctgcaggtggggggcatttgataggtgtgagagaagcaggccaggggtctctgctgaatatagagcaagaagttatggagcttatgagagtgcttatactctgtgtctagcaaggcctccctattttcatgaaattccatgcatggggctaaatctcactggcccaacaaggctttcaggaacctgttccaagaatcaacaaggtcacggttgttggagggaggtgtgcatgtgtgtcattctcctagagttttcatgagctgctcacttccccagctcctcaggggtgcctggggttatgtctgtggtgctgtccctgagtggcgaagaatgttggaggtggagcaggtcttctggagcaggagtggagggagctgtctaattacagaagcggggagaggacagtcagaggtgggggtctgggtagatttggggacaccctttttctatattggaccaattccaagtacctggagcagcacagtctcccctcttccaaagatttcccagctcctgctctgcagtctgactcgaatcagtttgctgcagatgcagaatgcactctctgccttggccaccctactgtgcctcccacccttgactgccgcagagttcattcagactccagttcctccagccctgtgtccatggggcctcatggtgtgcaggcagaaaggcacgtcgtttgcccaagaccagtccttgcccatgggagtctcgtgcagatccaaggtaggctcagggttgttctgcctttgggaaagcggggacagagtagcaaagggttaatctcaggggcttgtgctctctgggcaggggactttgccaggagcaacctgggctctgtccttcatcagcctggccctaatatccccattgtcttagggctcattgagccccatgtgtcagaacaggaagtctctgcagctgcatttggtggctttggcttcttccaagggctgcactcctcccctggcaaaatgcagatgggctcttttttttttttttttttgagtttctgggagtggtgaggaggagttaaaggttggaactaggggtggagcttctcaggttcacccaccaggaggctgcaggttgtgttgggcctcacagagaggcaaggggcaggttaaagcatttctcatgccccctgagtgtgggagcagccagcctgagcagccctccgtgcctctcagcatctctttggttgaactcagtgatttacactgcaaggtcaggccgtagattatacgcgtgtatgtgcatcttagaataaatgtgtttgtattcataggcacatggctatgtgagtgtgtcagcgtttcttatttatataaaaagtctcttaggtcgggcacggtggctcacacctgtaatcccagcattttgggaggccaaggggggcggatcatgaggtcaacagatcgagaccatcctggccaacatggtgaaatctcgtctctattaaaaatacaaaaattagcctggtgtggtggcaggcgcctataatcccagctactcgggaggctgaggcaggagaatcccttgaacccaggaagcagaggttgcagtgagccgagatcacaccactgcactccagcctggcgacagagtgagactctgtctcaaaaaaaagtcttctattttacataaaaaggaaaagccctcatgttggtctctgtttctagaacagtccaggagagtggatcctggccttgattcatatgtttgaaactggctggctagtcagaggggattatttggggtaaatatactgctgagataatagacaccacccttctctctgatccttcgaattggattctggccagctcctagtgcttaggaaacagggagacatggcttgcattatttaccccgttggaggccccatgctctcccttttcttttaaatcctttacctctaagtatacggaaatcacttttcacatctgaagagcccaactgcaggttggcaaatctctaacttggtttatttggctcatctgccctgactccattccccaagatcttggctcccagccctggctgcagccccaccatcactttggctcaggcacctgtcaactcctgaacaactgctatgtttgcatagatccctcccacctcaccaagaccctccgctctgggttcagccctctcagttccagaaagttctcaccaatacttctgaagtctccctacctcgttgctagtaaacccagaaggttatagcaaagaggggcttatttcatgtcccactgtggggttttgttttaacttgctgacggggcccaggctttgtgttctaagaccagaggacctcagaataaggcatggctgctcccatgtcttgggtggatgttcagggtttagtgagacagctacgtggggaaatagttgagggggctgtgccccctttgtgggccctcaggacatggtaacagtgggccaacgagggacaaagggagggagcaggctgaaaggaaaaaagccattttagcacctgttccattttttttcccgtgttgatggtagggtctgaacagtcatctcgttattccactaagagggctgggagtgtagagttgtggccatgaagggtcttggtggtgggagccccaggactcaggctcattgctgcccatggttttctggtttggctttgggtcaaggtaggattgttctgcatctgcagtttttttactttgagtgttgtggatttgatccttaaaaattcgagaaagtgggtgagaagctagataagctgggaagacattttctggagaaagtgtttggactgtcatttgccatccacccattcatccatctactcatccatccgtccatccatccatccatccatccatccatctatgatccatccatcatccatctattcatccatccatccacccagccattcactcatttactcaacaaaccactagtctataaattatttatgggcaggaaccatgactttattcatcttgacattccagggccactgtgcttgccatatagtagctgtttaacaaatgttaattgaacaatgtttaccaagtgcctagtttgtgctgggcaatggggacccattatacaaagaagaattagactctgttttcaaggagcttttaatacagatgataatgtctagataaaagcatgcacataaagaacttggtaaccagacagacagatgaatgcctttggaagttacaaatgaaggacatgacagtccagagggtagcaaaattacttctagtctagagtgaggggttggcaatcacaggaggcttcatgcaggaggcggtattgaagtggggtcttgaggaagaagcaggccctagatgctagagacagggcaggtgctcttcttacagagggcaagattctgatacctaagaggagtcctttcgtctagaagtcttctaggagtggctccacccctttggaatatcctgctgttctgtctcccttaggcctcctcatactggattttggtcacactcctttttctgtgtcgtgtcctgtgaagctgcagcatttctcccatcgggctggtagctccttctcctgtgaatccaccacccaagagcacggcaggggcagttgcttcagttcgagaagcattgttgagcacctacattgtgtcagactctgtgtagggccatgaggatataaagcttattgcagcgtggtcctcacccttgagaagggcagagtttaatgtgaaaatggtgagtgagtgtggggagtgtagacacattaaatacacattttccatactttcaggaaaatgttaaaagcaatggtgtatgcaagcactgagactctggaagcctaagggagaatcatttgcttttgccagggattcaaggaagtctccctggaggaggtgacagctgtgaagtcagccatgtaaaaggggtgtggacctggagcttgcaagaggggtgcaggggaacagggtgctctaggcagcaagaattgcagagtaaagacagggaagtgtggctcagtgcagtaccaaaccaaaagcagcttagcatcactcaagacagggcagggagtggtgggagaggacgctagagagcaaggttgaggccaggatgtggagggcatgggttggcccattgtccaatttgtttggggtttgggctttatgttctaagactagacaagctcagaacaaggcgtgtctgagagattaagctcagaaatggatgaggagatagctctgggccacctgctctcagggtgtggcctggaggcccatgatgtgctttgaattgcagtctgggaaccaccactctgcacctccctcccctgccacgcagctgtaatgctaagccttgccatggccatgcctcctttcccactcttgtttcctatgagggtatgtttccaggaatgaagaggtttgctgtcattcctttgtctcttggcagaattgtctctcaccccacacgctggcatccattcctttgatatttattgagcatctttcatatgctaggggctataaattgctattttaaaaatccccttgggttacttacagtgtcccctggtccccttattttcaccatgattgtaccctttgctttatgtctaactggatcccctcaaattcctcagtggagagagatccatgcttttcaaatcattgcattgagaaataaatgtatttttcctcttaaatgcctttcccaggttaaatgaccacttaatgacttttttcacctccccttctatctttttttttttttttttggagacagactctcgcactgtcacccagactggagtgcagtggcgcaatctcggctcactgccatctctgcctcctggattcagccattctcctgcctcagcctctggagtagctgggactacaggtgcccgccaccactcctggctaattttttgtatttttagtggagatggggtttcatcgtgttagccagaatggtctcagtctcctgacctcgtgatccgcccgcctcggcctcccaaagtcctgggattacaggcctgagccaccacgcccggcctatcttttgtttgaagacaactgtttaataacttcctaagatctcttgggaattctccagcgaggacaaggttgtgatttctgctgtgtacaagcctctggtttgagcaggcatgccagccagacatgattcagcacaaatataaatggacagctcttatccatgcagaggaatcttatgtaaatagaggcttattcagggcaaaccttttttttttttcatttttactgttatgtttattttctctgtaagtgctttgtgaatgctgtcccttcagtttattcttacagcaggacaaggaagtgagttatttaaaactaggaagctggctggcatggtggcccatgtttataatcccagcactttgggaggctgaagtgggcggattgcttgagcctaggagttcaagaccaacctgggttacatagagagactctgtctctacaaaaaaaataaaaaaagtgttagctgggcatggtggtgcatgccagtgtcccagctacttgggaggctgaggtgggaggatggcttgagcctgggaggttgaggttgcagtgagctgagattgcaccactgcactccagcctcagcaacagagtgaggggctctctctctctctctcaaaacaaaaacaaaaaaacaaaaacaaccccctgcccccaccaccaacaaacccatgccttaccattcctcctccccaggcaggattgatggaagtcaagagctaaagaagggaacagaatcttagcttgcattgaaagaagcacagtgcccccatcacagacaggaaggggcttcttattagttctggtgcacatgaagccaccttaagtatcctatcttagcaaggcactgtagttttaagaggtccattaacatattaaagtgggtgcagagaagattcccggaaaccatctgtactgaggactgggagaaacaactgggtctatctaactgggaggttggtgtctgtgaattccacagtattttctaatattggaagggttgtgatacagaaaccaggggagtgtgtgtgttttactatggaaggccaggcaagagcaaattcatcgcaactcagttcccatctgctgaaggcctgccagggccacaggctgatggacacaaaggcagggaagacaggtggtaacagtgctcagtggggaatctcagctgggggcaggtgtccagccgtggaaggggcaggaccttgagacctgaggctgagaggccccagttagggttgctgttgtgtcaggactgcaaggattctgagaatgcacatggatgcaagtgtctctcgactgagtgaataatgtgtctttttatgtatatgtattaccactttcaaatgtatatgactatgaactgcacttttatttaaaagtgttgctaaattcatagtaaaaaatgtatattctcaaaggatactggaagtatgagttctgacatgtgtgaaggtcaatgtaattttttgtgtgttaaaaggggccttcacaagcagagaggtatgggtgccatgccatgacggacaggtgactgggcctcctgctgctgaccacaacttcactgatcctttaagaggagttaggctcccatgaaatggagtggaaggcacgaaagctagatccttgaagaccttccttgggtcagggtggggtcttgctggcctgggcaagttaggagatttgatgaatcgccttccatggggatcctgaagagtaggagtggccaggtgaattctgcctcgaggtagaggagtggactggagagcctcctggccgtagcaccctatgagtctcgattttacacattgcaatccagtgactcactcttttctccagggagtaaacacttagggcgcttagttaataaacttcagataattcaagtgttggggatgactgtaaaccaactctgttttctcaaagtgtttattaggccctacaagtttagagggatgggcccaaccaataagaatttcaactcactgattatctcctccccttccaccacttccttcactcacagctctgatcagaattgacaatctagtcccacgaatgtattccccaatctttgttttgctccctgtcctctcaaaggtcaagccatgtcttctctgctatcccaaccccaagagtaagtatagattatgcccttcttcctttttcttccaccatctgctggggaggtccccgacccaggactagctgatgacagcagtggttgtgatgttgcttctcaaagattcttctccaagataattccctctaaaggaatgacaagcatggctcagaatcagtgggctctggcaatgactaagatctccccccattggggcactaagtaccctgaatcactatgggtttaggaattcctagagactcattgccctggactctagaccccacaccagaccaagcagcagcctcatttctgtctggcataaaggcaggtcctccatcctgctctcttagatattataaggaaaaatatggtctaatttttgtgatatgtttccttttttctttttcttttgttgagaagggtcttgttctgttgtccaggctggagtgccatggtgcaatcatagctcagtgcagccttgacctcccaggatcaagtgatcctccgaccttagcctcccaagcacctgggtctacaggcacatgacaccacacccggctaatctttgtatttttttcatagagatggtgttttgccatgtttccaaggctggtctgaaactcctgggctcaagcaatctgcccacctcagccttgcaaagtattggggttacaggcgtgagccaccacatttggccttgtgatatgtttcttaaaacactggcagatatttcattcatctagctatgttcctgtgagatctagagggtcagagatgattgatcatcttttatggttaatgatgctgaaatgcagagaatttaaatagctttggtcatgcttagtcatggggaggatctggtctagccctgggtttggttcattgcctttgagggagcaaagaggagaggagcctgtgtggccacactctaggcctgggctaacttcacagtccatgggcagaacttgcagaaaattagggatataagtcagagatgctggagaggggatcccagcaatgaacggggcagattgtgtgacctcaaatgtccagtcaacttcaacttgattctgtaattgattgattcttgattgattagttcttgattctgtgattctacatttttttcccctgaggaggtgacactcattttgcatgtaaatttttctaaatctgaacaccaaatttgagaagtctggattcctcacattgaaataatctcaattagcttgtgctacctcatgcaatgggagttgaactagctttcaaccagttttatctggttgtaatccagtataagggcttaaccattagtcattaataattaattgatggactaattcattttttcaacaaaccaaactttatggcacttactattggcaaagcactgtgctttggttcaaggcacccagtatattaacaagactggaaactcctggagagcttatggttttatcctggggaggagctaggatgttgcacagcctggcaggtaacacatgggagagataaggataaaatggaagaaccaggccactgaagaaaattgtacttcctttgcacttgggccactcccagccctacccagtgggtgttgaagaagtctctatcctttcccccaattctaaggaggctcctgccagggccatacagaccacacccttagaagggcccaatgtgcagcagacagaacaaaaaaggcctgtcctggagagataagcagctaacttggccagctccagagtgtgcaggatggctttcttttggacaaaccaagcccagtcataagcctctgaacaaccccagacagggagagtttcaggctttcggagtcagacatattccatagtgctgccggctctgccagatctggctttctggggtttgtgagggggcatgggcgactctcaggagcacatctctcaaacagaaaatggtcccacaggggccctgtgtgtcttgtccatgactgggtctccagagttttgcaaagggcctggcacacatttggcagtctgtaaatatttgctgaatttgttgttgacttgacatttgaatttcttgttccctaggccttaagctaaaaccagagaaaggccaaaatgtggggagcaagaaaggaagccatagataaaccccaagatgtgtaatagtgtataatttctctgggaagttttaaagagaaacaaacattaggcatgttggattttgccagtgtctgctcaacatacataggtgttaacttgactttttctccaaagatagtcataaaccaaaaggtcactacctcctgaactaaagcttggggtacagggagaacccaggaggcagatttgtgatagttctgggcttttttccaagaagggagaaggagaggtcagcgcttcatcccaaaggccagcgtagagctgggcacatactgtgcactcagtcattgtggagagacctgcatcactccttccattaagatactttcccagagctgtgagtgggctccactgtctccactactcagagaagcagaacctccccacacctcctccactctatcctctccagagctgggcaccgctctgcagggcccaggtgcagctaataggcagagggatggctgctgagcacctgatgcaggtgagcgtgcctcctgggtcctgtcagacagagctaggaggaggccatgcccaaacatggggcaacaccaggcaccaccccctcaccaggtaagcctgccaccttagcacttttaccatttcagcttattttcaaggtgtgtttggtagcctggaacaaacttattgccttggaggcaaacccagcccatgaatatttgggattaattatctctccttcgtttgagcccaacaacctcctcaaatgtatataaagggatttattttgcacaggtcttcatttcccatccctcttcctctgactctcagtgtccctgcttaacttacactcttctcttcgccaagctccttaccatgagcagacaagccagcaagacatctggtggcgggagccagggtttctccggccgctctgctgtggtctccggcagcagcaggatgagctgtgtggcccactctgggggagctggcggaggggcctatggcttccggagcggagcaggtggctttggcagtcgcagcctctacaacctgggcggcaacaagagcatctccatcagcgtggcagctggcggctcccgggctggaggctttgggggagggcggagcagctgtgcctttgcaggtggctatggaggtggctttgggagcggctatggaggtggctttggtggtggctttggtggtggcagaggaatgggaggtggctttggtggagctggtggctttggaggggctggtggctttggaggggctggtggctttggtggtcctggtggctttggtgggtctggtggctttggtgggcctggcagcttgggcagtcctggtggctttggccctgggggctttcctgggggaattcaggaagtgactatcaaccagagtctcctgcagcccctcaatgtggagatcgacccccagattgggcaagtaaaggcccaggagcgggaacagatcaagaccctcaacaacaagtttgcctccttcattgacaaggtaatgaagctttgactggtcatcccttcctgggctggggactttgaatttgacctttgggacacagtgtttaaatgtttcttggataggccagactggagggtgaggagttaggtggaactctagggtctgggaagatatccagggttgaggagtttgtctacatggtcaagtgaggggaggtgtagaaagaaaacagtcccctatttggacctgagcaccacacatcctgtttgtgggaacccctgctgaagtttccagtcattgcctcattgaggcccaggctggcagggcaggcagcccaaggcaagggccacagccaccatcagcgaagggtccaccaagaatgggaggcttttcaaatacaagctgccctctgaggctttccaggaagccctttccccctcatattgctgtgccaggcagaggaggctgattacctggagcagggattaagagcataagaaccttagttagtcccaagggagcgcagagaaatgagtgactttgcactcctactcagcctagtcaggaagacaagagtgctcggtgagcttctccagaccaggacagttctcatggggctgcctcccctccaggcccaagagaggtgttgtcatgctaactgtggcatgccagccagtgttgcttcccagcttcccagcatcacttcactgtttttgaagagctagcatgtcagtagagtcgtgggtggaaatggtgctgctgaggtttatgtgcatttttgtagagtgtactgtggttttggaagttaagatagggtcatgaagttcccaggaacaacaagcaataattctattgctttcaggtaggagctacttccccttcctttgtaactttccaaaccacgctgcaagtgtagtgtcctgactcatcacccatctgatcataatctctctgactacagtaggagcctatctttgcatcttttctaggcctttgtgctgggggcccaggagatagacacctagtcctacctgagtgaaggcccctctgctcctctgctacaagtgttgcctgatgttgcttcctgcaaccattgcaggtgcggttcctggagcaacagaacaaagtcctggagaccaagtggaacctgctccagcagcagggcacaagttccatctcaggcacaaacaaccttgagcctctttttgagaatcacatcaactacctgcggagctacctggacaacatcctcggggagagagggcgcctggactctgagctgaagaacatggaggacctggtggaagacttcaagaagaagtgagtgacagggcaggagtgggaagatgccatggcccaccctgtctcagagtcttggccccttctacatgccccctgactgctgggcagtggcgtctcctggcccatttccctctccttaccttcatgaaggacagcttggttcattcagttccccctcaccttccttctccaagcatggtgctttgcaaataaaattgtggcaagaggatgagtttaggctgggcttggtggctcatgcctgtaatcccagcactttgggaggccgaggtggacagatcatttgaggtcaggagttcaagaccagcctggccaacatggcgaaatatcatctctactaaaaatacaaaaattagctgggtgtggtggcacacacctgtaatccaagatagtcgggtggctgaggaaacagaatttcttgaaccctggaaatggaggttgcagtgagtcaagattgtaccactgcactccagcctcggtgacagagcgagactatgtctaaaaaaaaaacaaaaacaaaaaacggatgagtttagagttggggaagcatttcctcatgagccaggttggggaagatcctggttctggcatgtgaaagattctgggacaactcatggtatggtgatcaaccatccagaggtttgcctgggactgaggggtttcctgggatgcagaaattttagtgctaaaaccagacagtttgcctgggcaaattgacttggttggtcccccaactaacagggagatagtaaagaggatgtgctcatctgagaggggcaggatagggatggagggagggaagagatgaactttcagagttccagggaacaatggtgtttacgatgacctcaaaaccaaactcagctgtttcttttttattcacacagatatgaggatgaaatcaataaacgtacagctgctgagaatgaatttgtgactctgaagaaggtaagggctgtgtgtgaggtttctgaggcttgcagctgcaggtttctggctgggttgggggaatctcctcactccactgccacagagctgccaagttcaggcctttggagcaataaacagaagtcaggtgcaccttagtctggaagatccctaaaagagttagttcatcagtctttagttttttagtaggattaaacttagaccatcctaatgagatacaaattgcccgttcaagtggagactggtcttagacaaggaccatcactgcaccagtcccctctgctctttcttgctgcagttgtggtttgctgtttgttcattgggagaataaggcctttatcttcctcttttctcaggatgtggacagtgcctatatgaacaaggtggagcttcaggccaaagtggatgccttgatagatgagatcgacttcttaaggaccctctacgacgctgtaaggatgttacctactaagaagggacagagggagagtgaggtgtttccagatttgaggctggtgcattttggtatataggccccagaagacatctggaatgagcctggagatgaggacccttggaagggattccacaggataagctgcagacatggggttctctgagtggctgcggacagggtgtggctgatacacatgtggagcaaggaatcagtgaatgagactgttgatcaagagtctttcagggccctgtgtgcttgttacagggaccccaaaagtgaacaagctccctctgtgttgacaggagctatctcagatgcagagccacatcagtgacacatctgtggtgctgtccatggacaataatcgctccctggacctggacagcatcattgctgaagttcgtgcacagtatgaggatatcgctcagagaagcaaggccgaagctgaggccctgtaccagaccaaggtgggtgctagtcacctcttacgggatccactggaggtttcagagaggccatggcctattggacagctgggtagtgagttcccagtggtcactgggtgaatgccttttggttttaccctctgaagtcatccttctaatggtggttcagttgcagaaagtcttgcccctgggggagatggttgcctgctatgtgggactgactccaacttgctcaggaactacagggtaggaaaatcttctaccacaacaacccagatgttctctttcctgctgccttgggggtttccctgctgaaacacaatgcagtatcattttagcaaatgccttactgagcttctgaaggtttggtgggtgatgttggaggtgtagaaacaagtcaagcaaagctgcaggaataccccatcttcccttctgttctgcagttgggggagctgcagaccacggctggcaggcatggggatgacctaagaaataccaagagcgagatcatagagctcaacagaatgatccagaggctgcgggcagagatcgagggtgtcaagaagcaggtgggatggtcatggatgctggcacctgggatgattgctgaggggcaggggctaggatctcaggactcctcccctggaatagacgtctggaggtcatctcaggctggctgacccacagggcagtatctccacaaatggagacaagatggaggcactaggggaggaggaatgttccctgactttaagatgggataatccattgcatgtcaggaagggcctggggccctcttactgagctcattcctcctacctcccttgccccagaatgccaacctgcagacggccattgccgaggccgagcagcatggagagatggccctcaaggatgccaatgccaagctccaagagctgcaggctgctctacagcaggcgaaggatgacctggcgcggctgctacgtgactaccaggagctgatgaatgtcaagctggccctggacgtggagatcgccacctaccgcaagctgctggagggcgaggagtacaggtgagcctccagtcccgtcttcccacaccccctggctcaagtcataggccaagggccagataagtgaccaagtaactggggatggagccctgctgtataaagagaggccttgtggtgaagcatttgcctctaccagcccactccctcccagggcacgtatgcaaccagtgcccacaggctctccttgctacagcccaaagaggggtggagaaagcttacctgatttgccaggcttctctgttcagctctggttgctattcatgcccttggtccgtggacttgttggtgatgtgctttgtgacggggcccactttctcttgctttctcaaacaggatgtctggagagtgtccgagtgctgtcagcatctgtaagtaccgaaagtagctaagaaaatgagagttaattctgaaatatctgcactaatccagggtagtagcaactaatttaaacatatttttacggaagttggaggggttttctgggagaggagagggaagtgattggcttttgtaattgttctgggttcagggcacttttaataggcttcgacggccaatgtggaatatccaacagggggcctcttgataggaggataaattcagacgctagatcccctccaagggggtcatcaagactgtactgtgggaggaaccactggctaattcataatggcttaacggcaggggagtgagtagctagtggccttggaacggctcgtggtgaacatcctgtgcaaagctgccttgatcagctctggatagtcgtgggcccggtggatcattgacaataacatagcagctggcctgggcgccgtcgctgatcgctgtcctgtcctctcccccacagccgtggtcagcagcagcacgacttccgcctccgcaggtggctatggaggaggttacggcggaggcatgggcggtggtttaggaggtggcttcagtgcgggcggcggctcaggcagtggctttggccggggaggcggcggtggaatcggcggtggatttggcggcggcagcagcggtttcagcggtggcagcggctttggctccatctctggcgcccgctatggagtcagtggcgggggcttcagctcggccagcaaccggggcggcagcatcaagttctcccagtcctcccagtcctcccagcgctactccagataaagagcacgcatcagcatcgcagccactccagcgcctcccctccgctccccacgcccccatattggcaacacccccagcgccaccccatgctccccaagaacgcggctctgcgctggaaggcttgtggcctcttgctcctccttccagatccccggccaagcccagtcacgagaatttcaggctcttctctccggctccagcctgtgcctgtgattgtccaggtgtggcctaggccgccaccttctgctgccccggagtcccctccctgggtgggatgctcactacagctctgatgtatatagcacacagccccctccgcccctccggtctgtcgccaataaagtgcactgtgtttcactccgggcctctgagtattcgctccatgtccttctccttagggcactgagctccctggtcacctccctggcctccctgcctctgcctctcccatgtgggctctgtgatccacagagcagctggagaactcttcctctgaaacaaaggcagttcgtcttctcagtccatggtgcggatccggttgttcattattctgtgagcaccgtggggagggagaggtcctgctccccgacgctgttgtaccctgtgtacccttaccgtccttagtggtgaaggctggcccatgcagacatctgtctcctccctgtcttctctcatgtgggggaactaagagggccttggggacagagggtttcttcccttggtgttgattctcactccagctgacatcgtgaaagcttttcccccatcaaggtgctccgggaaagtgcgggctgctggaagcccagggatggaaataggccccagagcagcctatgtcaaagtctgacccaggaacaccattccattgagacactctgcaataaaagactccacgcccattacatcttttctttttggagcacatattagagtttctaagaagttcagtagcaaggaaaacctgttagcttccttgaatccaacatttcctgcagaggcccccattcctgcacctagcactgtgcatgcacttggggcctgaaaataggtgcaccagccatgagagttcttgtcatcctggcttctgccctgcaccaagaagctctgataatgtgttagttggccatgggagtgctgtccagaaggtgactgctggaaaggactcagaagcaaggagtccaaggcctttgcttccaaatgaaaagattgaggctcagagaggaggggtgactcctccagggtcttatagcatgtgaatgcctgagctaggaatgaagccctgcatcccaagtccggagctccctccacttccccacactgtcttcgaggatgccttccaggcatgtcacactgccggggcacccggagagaacacacaggctgtggaatagaaatgtgtagtcaggccaggccaggccagggaagcagtatttccatccttggacaaggctgaatttattttagagatgaggaaaagcagttagataaagaaaacctgcaactgggggttgaagagattcagcctggaaatccagctactggatccactttttgaaggaggtgggatttaggagctgttgcttcacatttgggtaggaaggtaccttttctggttggtatccttctgtggaaaggagtaggagacacaggtggggaggctcagtgcccaacccagtttagggggctcgccctatgggactgtgccaggccagtcatggggcagctgcttcaccctgggcaaagtctttatcaatgaattccttctttcactcattcaaccagtattcattaagtgtttattttctgtctggaactgggctaaattctggagacgaattggtgagcaagaaatcagatgttgaccccaccctcattttagtaagggagtcaacaaaaaaagtaagcaaaccaaatgaacacaataattttaagctgtgggaagtatataaagaaatgaaactagaggctgagttggatggatgccaggactggttaatggactggatggaggtggggaggttaagggaaaggggagattcaaccaggatgcccagtttcccagtatgaccacttgggtggttggtggtgccatttactgaggtgagtggaggggtgggagggcgagatgggtgtggagagaaacttcagctgtgctttagaaaagcaggagctgctcacgagatagccacatgagacatccaggagagatgtgagcctgtagattcagaagggggccccgtcagggctagacactcgcatctggacatcatcagcttaagggtggattttaaagccatggaaactaatgagtttttccagagagagggtggagaagagggcccatgctgagaaccaaagcagacttgaatgtagagtcagggacaggagtgcaatcaaccagatggtggagcctaggccacgttcttcagagtgcccccacccaagcagtcatgggggttctaaattggctccaaggaaagcccagagcaggcctggccttcctgggtactatgcacactggtttcaagtctcatgttcagactgtgacctctgtcctttgctgttcctccctggacctgtgctcgctggcacttgtttctcctgtggggtttacaggaacccctgctacctaagtaacaactagtggtgaggtggtgggatggggctccatgcagcttcttaaaggacagcctggtacaggaggagtggggtggagaggctatttcttggagatgtcattgttccagaggaatggccagggcaggttaccttggtgccaggacctaggacccaaggagttaactccatgcttggctggatattctcagcccagcactgactgtttctttctttctttattttttgagatggagtctccctatgtcactcaggctgtagtgcagtggcactatcttggctcactgcaacttctccctcctgggctcaagtgattcttgtgcctcaacctcctgagtagctgagattataggtgcaagccaccaagcccagctaatttttgcatttttagtagagattgccatgctggccagggtggtttctaactcctgacctcaggtgatccgcccgcctctgcctcgcaaagtgctgggattacaggcatgagccaccgcgccctgccaggccctgactgtttctaatccaggctgaaaaccccttgcagggaacttcacctgcttctcagtgctccttcttttcctttgccttagcatttgcatagtttttttgcacaattctatgttgacttttcaagagctcttaagtcactgggcttgagtttgctttcttgtacttgactagacttttcattcttctagtacatagtgagtcctgtgttgtccatgcttttcctgtcctctaaggcatacttttgcccacaaagagctcacagtgattgttgaataatgcctacttgtgagcctggatcctaaactgggatttggggtctttggccaatggtcaagaatttctttg
